(19) United States
(12) Patent Application Publication
(10) Pub. No.: US 2024/0398875 A1
(43) Pub. Date: Dec. 5, 2024

(54) PROBIOTIC COMPOSITIONS AND METHODS

(71) Applicant: UNIVERSITY OF OTTA WA, Ottawa, Ontario (CA)

(72) Inventors: Chantal MATAR, Ottawa, Ontario (CA); Nour YAHFOUFI, Manotick, Ontario (CA); Nafissa ISMAIL, Ottawa, Ontario (CA); Jean-Francois MALLET, Gatineau, Quebec (CA)

(21) Appl. No.: 17/769,301

(22) PCT Filed: Oct. 16, 2020
(86) PCT No.: PCT/CA2020/051385

§ 371 Date: Apr. 14, 2022

Related U.S. Application Data
(60) Provisional application No. 62/916,921, filed on Oct. 18, 2019.

(51) Int. Cl. A61K 35/741; A61K 9/00; A61K 35/00; A61K 35/744; A61K 35/745; A61K 35/747; A61K 36/06; A61P 1/00; A61P 37/02

(52) U.S. Cl. CPC A61K 35/741; A61K 9/0053; A61K 35/744; A61K 35/745; A61K 35/747; A61K 36/06; A61P 1/00; A61P 37/02; A61K 2035/115

(57) ABSTRACT

Provided herein are probiotic compositions comprising bacteria of the genus Rouxiella and in particular, Rouxiella badensis. Also provided are methods of using these probiotic compositions for promoting gut health including improving intestinal barrier function and to maintain or regulate intestinal homeostasis.

### FIELD OF THE INVENTION

[0001] This invention pertains generally to probiotic compositions and methods and, more particularly to probiotic compositions comprising bacteria of the genus Rouxiella and more specifically probiotic compositions comprising Rouxiella badensis or a subspecies or a strain thereof and methods of using these probiotic compositions.

### BACKGROUND OF THE INVENTION

[0002] The intestinal microbiota comprises more than 100 billon of microorganisms and more than 1000 different bacterial species that have an important role in promoting health (Qin J., et al. 2010. Nature, 464:59-65. doi: 10.1038/nature08821). Microbiota prevents pathogen colonization and maintains the gut mucosal immunity.

[0003] Probiotics are defined by the World Health Organization as live microorganisms that, “when administered in adequate amounts, confer a health benefit on the host.” The health benefits which have been claimed for probiotics include improvement of the normal microbiota, immunomodulatory effects, prevention of the infectious diseases reduction of serum cholesterol, anticarcinogenic activity, immune adjuvant properties, alleviation of intestinal bowel disease (IBD) symptoms and improvement in the digestion of lactose in intolerant hosts (Kumar M V V, et al. British Journal of Nutrition. 2012; 107 (7): p. 1006; Fábrega M J et al. Front Microbiol 2017; 11; 8:1274. doi: 10.3389/fmicb.2017.01274; Velez E M, et al. Br J Nutr 2015; 114 (4): 566-76. doi: 10.1017/S0007114515001981; Nelson H S. Allergy Asthma Proc 2016; 37 (4): 268-72. doi: 10.2500/aap.2016.37.3966 and He J, et al. Medicine (Baltimore) 2017; 96 (51): e9166. doi: 10.1097/MD.0000000000009166.)). There is evidence suggesting probiotic bacteria can reduce intestinal colonization by Salmonella typhimurium (Deriu, E. et al. Cell Host Microbe 2013, 14 (1): 26-37. Doi: 10.1016/j.chom.2013.06.007)

[0004] The genera most commonly used for probiotic preparations are Lactobacillus, Bifidobacterium, Streptococcus, Lactococcus and some fungal strains. Foods containing probiotic microorganisms for human consumption include fermented milks, cheeses, fruit juices, wine and sausages amongst others. Mixed cultures of live microorganisms are also used in probiotic preparations.

[0005] This background information is provided for the purpose of making known information believed by the applicant to be of possible relevance to the present invention. No admission is necessarily intended, nor should be construed, that any of the preceding information constitutes prior art against the present invention.

### SUMMARY OF THE INVENTION

[0006] An object of the present invention is to provide probiotic compositions and methods. In accordance with an aspect of the present invention, there is provided an oral probiotic composition comprising Rouxiella sp., optionally Rouxiella badensis and in some embodiments a subspecies or a strain thereof.

[0007] In accordance with another aspect of the invention, there is provided a food product comprising an effective amount of a probiotic bacteria of the genus Rouxiella, optionally the species Rouxiella badensis and in some embodiments a subspecies or strain thereof.

[0008] In accordance with another aspect of the invention, there is provided a method of promoting gut mucosal immunity in a mammal, the method comprising orally administering an isolated Rouxiella sp., a probiotic composition comprising Rouxiella sp. or a food product comprising Rouxiella sp., optionally Rouxiella badensis and in some embodiments a subspecies or strain thereof.

[0009] In accordance with another aspect of the invention, there is provided a method of restoring and/or increasing the intestinal epithelial barrier, the method comprising orally administering an isolated Rouxiella sp., a probiotic composition comprising Rouxiella sp. or a food product comprising Rouxiella sp., optionally Rouxiella badensis and in some embodiments a subspecies or strain thereof.

[0010] In accordance with another aspect of the invention, there is provided a method of protecting against Salmonella infection, the method comprising orally administering an isolated Rouxiella sp., a probiotic composition comprising Rouxiella sp. or a food product comprising Rouxiella sp, optionally Rouxiella badensis and in some embodiments a subspecies or strain thereof.

### BRIEF DESCRIPTION OF THE DRAWINGS

[0011] These and other features of the invention will become more apparent in the following detailed description in which reference is made to the appended drawings.

[0012] FIG. 1 illustrates neighbor-joining unrooted tree based on rrs gene sequences. Numbers indicate substitutions per nucleotide position.

[0013] FIG. 2 illustrates neighbor-joining unrooted tree based on MLSA. Numbers indicated substitutions per nucleotide position.

[0014] FIG. 3 illustrates the prophage positions in Rouxiella badensis acadiensis chromosome.

[0015] FIG. 4 shows colony morphology of Rouxiella badensis acadiensis plated on SDA and TSA media.

[0016] FIG. 5 shows resistance of Rouxiella badensis acadiensis to extreme conditions. (A) After 2 and 4 h of the bacterium incubation in TSA broth pH: 2, 3, 4, 5 and 7 at 30° C., serial dilutions were made and plate in agar plate for the CFU determination. (B) Growth of Rouxiella badensis acadiensis at 30° C. in TSA broth containing 0.3, 0.5 and 1% w/v bile salts for 2 and 4 h. Results were expressed as the Log10 of the Mean±SEM of three independent experiments.

[0017] FIG. 6 shows Rouxiella badensis acadiensis did not cause any toxicity effect on mammalian cells. Mice peritoneal macrophages were incubated at 37° C., 5% CO₂ for 24 h in presence of (A) increasing concentration Rouxiella badensis acadiensis (10⁷ to 10¹⁰ CFU/ml) and (B) the supernatants of a 18 h bacterium culture. Cell viability was determined by the MTT method and was expressed as the ratio between viable cells in the presence and absence of the compound multiplied by 100. Bars represent the mean±SEM of three experiments carried out in duplicate.

[0018] FIG. 7 shows bacterial composition at phylum level (10 most abundant phyla) following treatment with 10⁹ CFU/ml of Rouxiella badensis acadiensis daily for three weeks, prebiotic Protocatechuic acid (PCA), 100 mg/kgBW, both Rouxiella badensis acadiensis and prebiotic.

[0019] FIG. 8 shows two taxa with significantly different abundance across groups were found and linked to the administration of prebiotic or Rouxiella badensis acadiensis.

[0020] FIG. 9 shows adherence of Rouxiella badensis acadiensis to the intestinal epithelium. PBS (control), or Rouxiella badensis acadiensis (10⁹ CFU/ml) were administered by intragastric inoculation to Balb/c mice. Five and 15 minutes later mice were killed and their small intestine removed for (A) scanning electron microscopy, and (B) transmission electron microscopy, to evaluate the bacteria adhesion to the epithelium. Panels: I and IV-Control, II, V and III, VI: 5 and 15 minutes after Rouxiella badensis acadiensis administration, respectively.

[0021] FIG. 10 shows micrographs of small intestine sections. Animals were fed with (A) conventional diet (control) or (B and C) Rouxiella badensis acadiensis (10⁹ CFU/ml) for 7 days and three months, respectively, in their beverages. Small intestines were removed and tissue sections were stained with hematoxylin and eosin at the end of the feed periods. Red arrows indicate Paneth cells while black arrows denote Globet cells. (D) Transmission electron microscopy, showing Goblet cells in Rouxiella badensis acadiensis fed mice.

[0022] FIG. 11 shows effect of Rouxiella badensis acadiensis on intestinal integrity and prevention of LPS Induced-Inflammation. (A) shows micrographs of hematoxylin-eosin stained sections of small intestine of control group. (B) shows micrograph of hematoxylin-eosin stained sections of small intestine of LPS injected group. (C) shows micrographs of hematoxylin-eosin stained sections of small intestine of probiotic treated control group. (D) shows micrograph of hematoxylin-eosin stained sections of small intestine of LPS injected, probiotic treated group.

[0023] FIG. 12 shows phagocytic activity of peritoneal macrophages. Animals were fed with conventional diet (control) or 10⁹ CFU/ml of Rouxiella badensis acadiensis for (A) 7 days and (B) three months, respectively. The phagocytosis of macrophages was performed using an opsonized Saccharomyces cerevisiae suspension. Percentages of phagocytosis were expressed as the percentage of phagocyting macrophages in 100 cells counted in an optical microscope. Results are expressed as the Mean±SEM of three experiments.

[0024] FIG. 13 shows a determination of the antimicrobial activity in animals' intestinal fluids. S. aureus and S. typhimirium (10⁹ CFU/ml) were incubated for 2 h at 37° C. in the presence of the intestinal fluids of mice fed with conventional diet, or Rouxiella badensis acadiensis for consecutive (A and B) seven days, (C and D) 1 month, or (D and E) 3 month, respectively. After the co-incubation, viable bacteria were determined by plate counts agar. Results are expressed as CFU/ml. **p<0.01, ***p<0.001.

[0025] FIG. 14 shows influence of Rouxiella badensis acadiensis on the body weight. Animals were fed with conventional diet (control) or diet supplemented with 10⁹ CFU/ml of Rouxiella badensis acadiensis for 1 or 3 months consecutive respectively. Body weight was determined every 2 or 4 days. Results were expressed as the % of mean of the initial weight (weight registered the day before bacterium administration).

[0026] FIG. 15 shows results of challenge with S. typhimurium in Rouxiella badensis acadiensis fed mice. Mice fed with conventional diet or Rouxiella badensis acadiensis supplemented diet for seven days were orally infected with S. typhimurium. After the challenge one groups of mice also received Rouxiella badensis acadiensis supplemented diet for seven days following challenge (continuous). (A) Translocation of bacteria to liver and spleen in mice 7 days' post infection. (B) Survival of the animals to Salmonella challenge.

[0027] FIG. 16 shows mean±SEM of concentration of different (A) anti-inflammatory cytokines IL-10, (B) pro-inflammatory cytokine-IL-6 as well a (c) IgA in the intestinal fluid (CTR) control mice fed 1% sucrose or Rouxiella badensis acadiensis treated group 10⁸ CFU/mouse/day for 7 days. Number of animals per group is n=10. Difference is considered significant between groups if *p<0.05 ns=non-significant difference when p>0.05.

[0028] FIG. 17 shows mean±SEM of the number of IgA, IgG and IL10 positive cells populations in 10 fields of objective 100× in the ileum of mice fed 1% sucrose (CTR) or Rouxiella badensis acadiensis (labelled AV) fed Rouxiella badensis acadiensis 10⁸ CFU/mouse/day for 7 days. Significant difference between mice if *p<0.05, ** if p<0.01 and *** if p<0.001.

[0029] FIG. 18 shows mean±SEM of relative expression of miR145 and miR146a in the brain and ileum of (CTR) control mice fed 1% sucrose or Rouxiella badensis acadiensis treated group 10\hat{ } 8 CFU/mouse/day for 7 days. Significant difference between mice exists if *p<0.05.

[0030] FIG. 19 shows intestinal permeability measured by FITC-dextran in serum of animals that received conventional diet (control), or the supplementation with 10⁹ Rouxiella badensis acadiensis.

[0031] FIG. 20 shows cadherin in jejunum. Animals received conventional diet (control/top), or the supplementation with Rouxiella badensis acadiensis (bottom). Magnification: 40×.

[0032] FIG. 21 shows occludin in ileum. Animals received conventional diet (control/top), or the supplementation with Rouxiella badensis acadiensis (bottom). Magnification: 40×.

[0033] FIG. 22 shows production of antimicrobial peptides in the intestinal fluids of animals that received conventional diet (control/top), or the supplementation with Rouxiella badensis acadiensis (RBA).

### DETAILED DESCRIPTION OF THE INVENTION

[0034] The present invention relates to probiotic bacteria belonging to the genus Rouxiella, to compositions comprising the same and methods of using the probiotic strains and compositions.

### Definitions

[0035] Unless defined otherwise, all technical and scientific terms used herein have the same meaning as commonly understood by one of ordinary skill in the art to which this invention pertains.

[0036] The term “probiotic” means live microorganisms that, when administered in adequate amounts, confer a health benefit on the host.

[0037] The term “microbiota” means the ecological community of microorganisms found in and on a multicellular organism and includes commensal, symbiotic and pathogenic microorganisms.

[0038] The term “intestinal microbiota” means microbiota within the intestines.

[0039] The term “Rouxiella badensis—like probiotic bacteria” or “RBL probiotic bacteria” refers to the probiotic bacteria characterized in Example 1 and having has a rrs gene sequence as set forth in SEQ ID NO:1, has a grol gene sequence as set forth in SEQ ID NO:2, a gyrB gene sequence as set forth in SEQ ID NO:3 a fusA gene sequence at as set forth in SEQ ID NO:4, has a pyrG gene sequence as set forth in SEQ ID NO:5, a rplB gene sequence as set forth in SEQ ID NO:6, a rpoB gene sequence as set forth in SEQ ID NO:7 and a sucA gene sequence as set forth in SEQ ID NO:8.

[0040] The abbreviation “CFU” is short for colony forming unit and refers to the amount of bacteria in a probiotic that are viable and capable of dividing and forming colonies

### Probiotic Bacteria:

[0041] Probiotic bacteria closely related to Rouxiella badensis and in particular, closely related to strains 421 or 323 of this species. Optionally, the invention comprises the probiotic bacteria isolated from the microflora of lowbush blueberry (Vaccinium angustifolium) and referred herein as to Rouxiella badensis acadiensis and deposited with ATTC® Patent Depository (10801 University Boulevard Manassas, Virginia 20110-2209) in its capacity as an International Depository Authority on Jul. 22, 2020 under Accession Number PTA-126681.

[0042] In other embodiments, the invention comprises Rouxiella badensis, optionally strains 421 or 323.

[0043] In other embodiments, the invention comprises a probiotic composition comprising at least one, at least two, or at least three probiotic bacteria belonging to the genus Rouxiella and optionally one or more probiotic bacteria belonging to different genus or probiotic yeast strains. In some embodiments, one or more probiotic bacteria belonging to different genus are selected from the group consisting of Lactobacillus, Bifidobacterium, Streptococcus, and Lactococcus.

[0044] The probiotic bacteria of the invention can be defined by reference to specific gene sequences. In one embodiment, the probiotic bacteria has a rrs gene sequence at least 97% identical to the sequence set forth in SEQ ID NO:1, has a grol gene sequence at least 97% identical to the sequence set forth in SEQ ID NO:2 and a gyrB gene sequence at least 97% identical to the sequence set forth in SEQ ID NO:3.

[0045] In one embodiment, the probiotic bacteria has a rrs gene sequence at least 97.5% identical to the sequence set forth in SEQ ID NO:1, has a grol gene sequence at least 97.5% identical to the sequence set forth in SEQ ID NO:2 and a gyrB gene sequence at least 97.5% identical to the sequence set forth in SEQ ID NO:3.

[0046] In one embodiment, the probiotic bacteria has a rrs gene sequence at least 98.5% identical to the sequence set forth in SEQ ID NO:1, has a grol gene sequence at least 98.5% identical to the sequence set forth in SEQ ID NO:2 and a gyrB gene sequence at least 98.5% identical to the sequence set forth in SEQ ID NO:3.

[0047] In one embodiment, the probiotic bacteria has a rrs gene sequence at least 99.9% identical to the sequence set forth in SEQ ID NO:1, has a grol gene sequence at least 99.9% identical to the sequence set forth in SEQ ID NO:2 and a gyrB gene sequence at least 99.8% identical to the sequence set forth in SEQ ID NO:3.

[0048] In one embodiment, the probiotic bacteria has a rrs gene sequence as set forth in SEQ ID NO:1, has a grol gene sequence as set forth in SEQ ID NO:2 and a gyrB gene sequence as set forth in SEQ ID NO:3.

[0049] In one embodiments, the invention comprises a probiotic bacteria has a fusA gene sequence at least 97% identical to the sequence set forth in SEQ ID NO:4, has a pyrG gene sequence at least 97% identical to the sequence set forth in SEQ ID NO:5, a rplB gene sequence at least 97% identical to the sequence set forth in SEQ ID NO:6, a rpoB gene sequence at least 97% identical to the sequence set forth in SEQ ID NO:7 and a sucA gene sequence at least 97% identical to a sequence set forth in SEQ ID NO:8.

[0050] In one embodiments, the invention comprises a probiotic bacteria has a fusA gene sequence at least 97.5% identical to the sequence set forth in SEQ ID NO:4, has a pyrG gene sequence at least 97.5% identical to the sequence set forth in SEQ ID NO:5, a rplB gene sequence at least 97.5% identical to the sequence set forth in SEQ ID NO:6, a rpoB gene sequence at least 97.5% identical to the sequence set forth in SEQ ID NO:7 and a sucA gene sequence at least 97.5% identical to a sequence set forth in SEQ ID NO:8.

[0051] In one embodiment, the invention comprises a probiotic bacteria has a fusA gene sequence at 100% identical to the sequence set forth in SEQ ID NO:4, has a pyrG gene sequence 100% identical to the sequence set forth in SEQ ID NO:5, a rplB gene sequence 100% identical to the sequence set forth in SEQ ID NO:6, a rpoB gene sequence at least 99.8% identical to the sequence set forth in SEQ ID NO:7 and a sucA gene sequence at least 99.8% identical to a sequence set forth in SEQ ID NO:8.

[0052] In one embodiment, the invention comprises a probiotic bacteria has a fusA gene sequence at as set forth in SEQ ID NO:4, has a pyrG gene sequence as set forth in SEQ ID NO:5, a rplB gene sequence as set forth in SEQ ID NO:6, a rpoB gene sequence as set forth in SEQ ID NO: 7 and a sucA gene sequence as set forth in SEQ ID NO:8.

[0053] In one embodiment, the probiotic bacteria of the invention has a rrs gene sequence as set forth in SEQ ID NO:1, has a grol gene sequence as set forth in SEQ ID NO:2, a gyrB gene sequence as set forth in SEQ ID NO:3 a fusA gene sequence at as set forth in SEQ ID NO:4, has a pyrG gene sequence as set forth in SEQ ID NO:5, a rplB gene sequence as set forth in SEQ ID NO:6, a rpoB gene sequence as set forth in SEQ ID NO:7 and a sucA gene sequence as set forth in SEQ ID NO:8.

[0054] In some embodiments, the probiotic bacteria chromosome includes intact prophage that shares sequences identity to the temperate Salmonella SN5 phage.

[0055] In some embodiments, the probiotic bacteria has a plasmid having a sequence as set forth in SEQ ID NO:9 or SEQ ID NO: 10.

[0056] In some embodiments, the probiotic bacteria has a first plasmid having a sequence as set forth in SEQ ID NO:9 and a second plasmid having a sequence as set forth in SEQ ID NO: 10.

[0057] In one embodiment, the probiotic bacteria is a Rouxiella badensis-like probiotic bacteria, optionally Rouxiella badensis or a subspecies or strain thereof. In some embodiments, the probiotic bacteria is a bacteria substantially identical to the bacteria deposited with the ATTC® Patent Depository under Accession Number PTA-126681 and referred to as Rouxiella badensis acadiensis.

[0058] In some embodiments, the probiotic bacteria comprise bacteriocins, ribosomally synthesized antibacterial peptides (colicin V and Bacteriocin production cluster) and/or anti-virulence genes.

### Probiotic Compositions:

[0059] The probiotic compositions include compositions comprising the probiotic bacteria, optionally with an appropriate carrier or stabilizer. The probiotic compositions may include different dosages of the bacterium.

[0060] In some embodiments, the probiotic compositions include compositions consisting essentially of the probiotic bacteria. The probiotic compositions may include different dosages of the bacterium.

[0061] In some embodiments, the probiotic compositions comprise dead and/or inactive probiotic bacteria.

[0062] In some embodiments, the probiotic compositions comprise heat-killed probiotic bacteria.

[0063] In some embodiments, the probiotic composition further comprises at least one other probiotic bacteria and/or yeast, optionally selected from Escherichia coli Nissle 1917, Leuconostoc mesenteroides, Lactobacillus plantarum, Pediococcus pentosaceus, Lactobacillus brevis, Leuconostoc citreum, Leuconostoc argentinum, Lactobacillus paraplantarum, Lactobacillus coryniformis, Weissella spp., Weissella spp., Leuconostoc mesenteroides, Lactobacillus fermentum, Lactobacillus acidophilus, Bifidobacterium bifidum, Streptococcus thermophilus, Lactobacillus delbrueckii subsp. bulgaricus, Lactobacillus helveticus, Lactobacillus kefiranofaciens, Lactococcus lactis, Lactococcus lactis, Gluconacetobacter xylinus, Zygosaccharomyces sp., Acetobacter pasteurianus, Acetobacter aceti, Saccharomyces boulardii and Gluconobacter oxydans

[0064] In some embodiments, the probiotic composition further comprises lactic acid bacteria selected from the group consisting of Lactobacillus, Bifidobacterium, Streptococcus and Lactococcus or combinations thereof. Optionally, the probiotic compositions include one or more probiotic yeast strains.

[0065] In some embodiment, the probiotic composition further comprises a prebiotic. The prebiotics are carbohydrates which are generally indigestible by a host animal and are selectively fermented or metabolized by bacteria. The prebiotics include oligosaccharides such as fructooligosaccharides (FOS) (including inulin), galactooligosaccharides (GOS), trans-galactooligosaccharides, xylooligosaccharides (XOS), chitooligosaccharides (COS), soy oligosaccharides (e.g., stachyose and raffinose) gentiooligosaccharides, isomaltooligosaccharides, mannooligosaccharides, maltooligosaccharides and mannanoligosaccharides. Optionally, the combined probiotic and prebiotic is a symbiotic.

[0066] The probiotic compositions may be provided as a dried, powdered or lyophilized form.

[0067] The probiotic compositions may be provided as a solid oral form. Solid forms include tablets, capsules, pills, troches or lozenges, cachets, pellets, powders, or granules or incorporation of the material into particulate preparations of polymeric compounds such as polylactic acid, polyglycolic acid, etc. or into liposomes.

[0068] The probiotic compositions may be provided in liquid form including emulsions, solutions, suspensions, and syrups.

[0069] The probiotic compositions may include other components such as inert diluents; carriers, adjuvants, wetting agents, emulsifying and suspending agents; and sweetening, flavoring, and perfuming agents.

[0070] The probiotic compositions include nutritional compositions, i.e., food products that comprise the probiotic bacteria alone or in combination with other probiotic bacteria. The food product can be a dairy product, for example, milk or a milk-based product. Exemplary milk sources include, without limitation, cattle, sheep, goat, yak, water buffalo, horse, donkey, reindeer and camel.

[0071] The milk can be whole milk or milk that has been processed to remove some or all of the butterfat, e.g., 2% milk, 1% milk or no-fat milk. In some embodiments, the milk can be previously pasteurized and or homogenized, dried and reconstituted, condensed or evaporated. Fractions of milk products including casein, whey protein or lactose may also be used.

[0072] The food product can be a cereal product, for example, rice, wheat, oats, barley, corn, rye, sorghum, millet, or triticale. The cereal product can be a whole grain or be milled into a flour. The food product can be a single kind of cereal or a mixture of two or more kinds of cereals, e.g., oat flour plus malted barley flour. The cereal products can be of a grade and type suitable for human consumption or can be products suitable for consumption by domestic animals.

[0073] The food product can also be a vegetable or a fruit product, for example, a juice, a puree, a concentrate, a paste, a sauce, a pickle or a ketchup. Exemplary vegetables and fruits include, without limitation, squashes, e.g., zucchini, yellow squash, winter squash, pumpkin; potatoes, asparagus, broccoli, Brussels sprouts, beans, e.g., green beans, wax beans, lima beans, fava beans, soy beans, cabbage, carrots, cauliflower, cucumbers, kohlrabi, leeks, scallions, onions, sugar peas, English peas, peppers, turnips, rutabagas, tomatoes, apples, pears, peaches, plums, strawberries, raspberries, blackberries, blueberries, lingonberries, boysenberries, gooseberries, grapes, currants, oranges, lemons, grapefruit, bananas, mangos, kiwi fruit, and carambola.

[0074] The food product can also be a “milk” made from grains (barley, oat or spelt “milk”) tree nuts (almond, cashew, coconut, hazelnut or walnut “milk”), legumes (soy, peanut, pea or lupin “milk”) or seeds (quinoa, sesame seed or sunflower seed “milk”).

[0075] Also contemplated are food products comprising animal proteins, for example, meat, for example, sausages, dried meats, fish and dried fish products and/or convenience foods.

### Methods of Use

[0076] The disclosed probiotic bacteria and compositions comprising the same can be used, for example, to promote gut health including improving intestinal barrier function and to maintain or regulate intestinal homeostasis.

[0077] In some embodiments, the disclosed probiotic bacteria and compositions comprising the same are useful in the treatment or prevention of gastrointestinal disorders or diseases including antibiotic-associated diarrhea, infectious childhood diarrhea, ulcerative colitis, IBS, IBD, and antibiotic-associated microbial dysbiosis.

[0078] In some embodiments, the disclosed probiotic bacteria and compositions comprising the same can be used to treat or prevent gastrointestinal tract infection including recurrent C. difficile infection, Salmonella serotypes infection and enterohemorrhagic E. coli infection

[0079] In some embodiments, the disclosed probiotic bacteria and compositions comprising the same can be used to improve gut immune function.

[0080] In some embodiments, the disclosed probiotic bacteria and compositions comprising the same can be used to increase the number the release of antimicrobial peptides.

[0081] To gain a better understanding of the invention described herein, the following examples are set forth. It should be understood that these examples are for illustrative purposes only. Therefore, they should not limit the scope of this invention in any way.

### Example 1: Characterization of Probiotic Bacterium

Rouxiella badensis—Like Probiotic Bacteria and Medium:

[0082] The Rouxiella badensis-like probiotic bacteria was isolated from the blueberry microbiota deposited with the ATCC acting in its capacity as an International Depository Authority on Jul. 22, 2020 under Accession Number PTA-126681 and referred to Rouxiella badensis acadiensis. The Rouxiella badensis acadiensis was growth in Tripticase Soy Agar (TSA) (Britania, Buenos Aires, Argentina) and Potato Dextrose Agar (PDA) (Britania, Buenos Aires, Argentina) at 30° C. and 37° C. for 24 h.

### Bacterial Identification:

[0083] DNA extracted from a pure culture of the RBL probiotic bacteria was sequenced using Pacbio RS II technology. The sequencing produced three contigs having a length of 4,929,777 bp, 120,600 bp and 82,542 bp with a % GC content of 53.0%, 49.4% and 44.1% respectively.

[0084] The two smaller contigs representing potentially two native plasmids were identified. The two smaller contigs contain several genes involved in conjugal transfer.

[0085] The sequence of the rrs gene (16S rDNA) from the Pacbio sequencing of the RBL probiotic bacteria was aligned (Geneious alignment) to the same rrs genes found in Le Flèche-Matéos J Syst Evol Microbiol. 2017 May; 67 (5): 1255-1259. All sequences were trimmed to 1357 bp. Referring to FIG. 1, a genetic tree was generated using the neighbour-joining algorithm, and bootstrap analysis was performed with 1000 replicates. RBL probiotic bacteria rrs gene shows perfect sequence homology to the Rouxiella badensis strain 421 (100% identity) which suggest that the RBL probiotic bacteria is part of the Rouxiella genus.

[0086] In order to distinguish the species, two other gene sequences that show increased evolutionary heterogeneity (groL and gyrB) and are therefore better to discriminate among species and subspecies were assessed. The sequences of the RBL probiotic bacteria grol and gyrB genes was compared to the sequences of the three Rouxiella strains for which the whole genome sequences are available. The table below details the identity similarity between the RBL probiotic bacteria and the known Rouxiella strains for rrs, groL and gyrB.

| | | % Identity | % Identity | % Identity |
|---|---|---|---|---|
| Bacteria | Strain | rrs | groL | gyrB |
| Rouxiella badensis | 323 | 99.9% | 99.9% | 99.8% |
| Rouxiella badensis | 421 | 100% | n/a | n/a |
| Rouxiella silvae | 213 | 99.3% | 93.6% | 88.2% |
| Rouxiella silvae | 223 | 99.3% | n/a | n/a |
| Rouxiella chamberiensis | 130333 | 99.4% | 92.3% | 90.1% |

[0087] The RBL probiotic bacteria showed extremely high homology with both strains of Rouxiella badensis. As the genome of Rouxiella badensis strain 421 is not available in the public database, the only genes assessed where rrs, fusA, pyrG, rplB, rpoB and sucA.

[0088] Partial sequences of five housekeeping genes of Rouxiella badensis strain 421 (fusA, pyrG, rplB, rpoB and sucA) were available to perform a multi-locus sequence analysis (MLSA) (Le Flèche-Mateos 2017, Le Flèche-Matéos Int J Syst Evol Microbiol. 2015 June; 65 (Pt 6): 1812-8.). These partial sequences of these genes from Rouxiella badensis strain 421 were used to search the genome of the RBL probiotic bacteria as well as the other Rouxiella strains, plus selected, fully sequenced, bacterial chromosomes. The five partial sequences were concatenated, in alphabetical order, for each bacterium, and a genetic tree created from the alignment was done as described above.

[0089] Referring to FIG. 2, the tree generated by MLSA mirrored the results obtained using rrs gene analysis, Consistent with the RBL probiotic bacteria being part of the Rouxiella genus. To determine more closely the level of homology between the Rouxiella strains and the RBL probiotic bacteria, especially the two R. badensis, each of the five sequences used in MLSA was analyzed individually (table below).

| | | % Identity | % Identity | % Identity | % Identity | % Identity |
|---|---|---|---|---|---|---|
| Bacteria | Strain | fusA | pyrG | rplB | rpoB | sucA |
| R. badensis | 323 | 100% | 100% | 100% | 99.8% | 99.8% |
| R. badensis | 421 | 100% | 100% | 100% | 100% | 99.8% |
| R. silvae | 213 | 96.2% | 97.4% | 98.5% | 95.3% | 89.0% |
| R. silvae | 223 | 96.2% | 97.4% | 98.5% | 95.3% | 89.0% |
| R. chamberiensis | 130333 | 93.7% | 95.4% | 97.9% | 94.1% | 88.0% |

[0090] For the five genes, as well as for rrs, the closest match to the genes of the RBL probiotic bacteria are the genes from Rouxiella badensis strain 421, followed by Rouxiella badensis strain 323. Comparison of common sequence fragments between the RBL probiotic bacteria and the two strains of Rouxiella badensis are consistent with RBL probiotic bacteria belonging to the Rouxiella genus and more specifically being highly related to the badensis species. The specific strain was named Rouxiella badensis acadiensis.

### Sequences:

(rrs)
SEQ ID NO: 1
ttttaattgaagagtttgatcatggctcagattgaacgctggcggcaggcctaacacatgcaagtcgagcggtagcacggg
agagcttgctctctgggtgacgagcggcggacgggtgagtaatgtctgggaaactgcctgatggagggggataactactg
gaaacggtagctaataccgcatgatgtcgcaagaccaaagtgggggaccttcgggcctcacgccatcggatgtgccca
gatgggattagctagtaggtggggtaatggctcacctaggcgacgatccctagctggtctgagaggatgaccagccaca
ctggaactgagacacggtccagactcctacgggaggcagcagtggggaatattgcacaatgggcgcaagcctgatgca
gccatgccgcgtgtgtgaagaaggccttagggttgtaaagcactttcagcgaggaggaaggcgttgtagttaatagctgca
acgattgacgttactcgcagaagaagcaccggctaactccgtgccagcagccgcggtaatacggagggtgcaagcgtt
aatcggaattactgggcgtaaagcgcacgcaggcggtttgttaagtcagatgtgaaatccccgagcttaacttgggaactg
catttgaaactggcaagctagagtcttgtagaggggggtagaattccaggtgtagcggtgaaatgcgtagagatctggag
gaataccggtggcgaaggcggccccctggacaaagactgacgctcaggtgcgaaagcgtggggagcaaacaggatt
agataccctggtagtccacgctgtaaacgatgtcgacttggaggttgtgcccttgaggcgtggcttccggagctaacgcgtt
aagtcgaccgcctggggagtacggccgcaaggttaaaactcaaatgaattgacgggggcccgcacaagcggtggagc
atgtggtttaattcgatgcaacgcgaagaaccttacctactcttgacatccagagaatttgctagagatagcttagtgccttcg
ggaactctgagacaggtgctgcatggctgtcgtcagctcgtgttgtgaaatgttgggttaagtcccgcaacgagcgcaacc
cttatcctttgttgccagcacgtaatggtgggaactcaaaggagactgccggtgataaaccggaggaaggtggggatgac
gtcaagtcatcatggcccttacgagtagggctacacacgtgctacaatggcgtatacaaagagaagcgaactcgcgaga
gcaagcggacctcataaagtacgtcgtagtccggattggagtctgcaactcgactccatgaagtcggaatcgctagtaatc
gtagatcagaatgctacggtgaatacgttcccgggccttgtacacaccgcccgtcacaccatgggagtgggttgcaaaag
aagtaggtagcttaaccttcgggagggcgcttaccactttgtgattcatgactggggtgaagtcgtaacaaggtaaccgtag
gggaacctgcggttggatcacctccttacc
(groEL)
SEQ ID NO: 2
atgtcagctaaagatgtaaaattcggtaacgacgcccgcgtaaaaatgctgaacggcgttaacattctggctaacgcagtt
aaagtgaccttaggccctaaaggccgtaacgtcgttttggacaaatcttttggtgcgccaacgattactaaagacggcgtttc
tgttgcgcgtgaaatcgaactggaagacaagttcgaaaacatgggcgctcagatggtgaaagaagttgcgtccaaagct
aacgatgctgcgggtgacggtactacgactgcaaccgtgctggctcaggccatcatcaccgaaggtctgaaagctgttgc
tgccggtatgaacccaatggacgttaagcgcggtatcgacaaagctgtcgttaacgcggttgaagagctgaaaaagctgt
ccgttccttgctctgactctaaagctatcgctcaggttggtactatttctgccaactccgacgaaaccgtgggcaaactgattg
ctcaggcgatggaaaaagtaggcaaagaaggcgttatcaccgttgaagaaggcactggcctgatcgacgagctggac
gttgttgaaggtatgcagtttgaccgcggctacctgtctccttacttcatcaacaagccagaaactggcgctgttgaacttgaa
agcccgttcatcctgctggccgacaaaaaaatctccaacattcgcgaaatgctgccagttctggaagccgttgctaaagcc
ggtaaaccactgcttatcgttgcagaagacgttgaaggtgaagcactggcaacgctggttgttaacaccatgcgtggcatc
gtgaaagttgctgctgttaaagcaccaggcttcggcgaccgtcgtaaagctatgctgcaagacatcgcaaccctgaccgg
cggtaccgtaatctctgaagagatcggtatggagctggaaaaagcgaccctggaagacatgggtcaggctaagcgcgtt
gttatcaacaaagacaccaccatcatcatcgatggtatcggtgacgaaaccaccattcagggccgcgtaaatcagatcc
gtcagcagatcgaagaagcgacctctgactacgataaagaaaaactgcaagagcgtgtggctaaactggcaggcggc
gttgccgttctgaaagtgggcgcagcgactgaagttgaaatgaaagagaagaaagcacgcgttgaagatgccctgcac
gctacccgtgctgcggttgaagaaggcgtggttgccggtggtggtgttgcgctgatccgcgttgctcacaaactggctggcc
tgaaaggcgacaacgaagaccagaccgtaggtatcaaagttgcactgcgtgcaatggaagcacctctgcgtcagatcgt
tatcaacgccggtgaagaagcttctgttatcgccaacaacgtgaaagcgggtgaaggcagctacggctataacgcttaca
ccgaagaatacggcgatatgatcgcgatgggtatcctggatccaactaaagttacccgttctgctctgcagtacgcgtcttct
gtagctggcctgatgatcaccaccgagtgcatgattaccgacctgcctaaagacgacaaagtcgacatgggcggcgctg
gcggtatgggtggaatgggcggcatgggcggcatgatgtaa
(gyrB)
SEQ ID NO: 3
atgtcgaattcttatgactcctcaagtatcaaggtattaaaagggctggacgcggtgcgtaagcgccccggcatgtatatcg
gcgataccgatgacggcactggtctgcaccacatggtattcgaggttgtggacaacgctatcgacgaagccctcgctggc
cactgtaaagagattctggttacgattcatgcggataactccgtctccgttcaggatgatggtcgtggcattccaaccggcatt
cacgaagaagaaggcatctctgccgcagaagtcatcatgactgttcttcacgccggcggtaaatttgacgataactcatac
aaagtgtccggcggcctgcacggcgtgggtgtatctgttgttaacgccctgtctgaaaagctggagttggttatccgtcgtga
aggtaaagttcacgaacaaacctacgtccacggcgagcctcagaatccactgaaagtcgttggcgagaccgaactaac
cggaacaaccgtacgcttctggccgagcttccagaccttcacaaaccataccgaattcgagtacgacatcctggccaag
cgcctgcgcgagctgtcgttcctgaactccggcgtggctatccgcctgcacgacaagcgtgatgacaaacaggatcactt
ccactacgagggcggcattaaggcgttcgtggaatacctgaacaaaaacaagaatccaatccacccgaccgtgttctatt
tctctaccatgaaagacgacatcggcgtggaaattgctctgcaatggaacgacggtttccaggaaaacatttactgctttac
caacaatattccacagcgtgacggcgggactcacctcgccggtttccgtgcggcgatgacccgtaccctgaacgcgtac
atggataaagaaggctacagcaagaaatccaaaatcagtgccaccggtgacgacgcccgtgaaggcctgatcgccgtt
gtttctgtaaaagtgccggatcctaagttctcttctcagaccaaagacaagctggtgtcgtcagaagtgaaatcagcggttg
aaaccctgatgaacgaaaagctggttgattatctgatggaaaacccgggcgacgcgaaaatcgttgtcggcaaaatcat
cgatgcggctcgtgcgcgtgaagcggcacgtaaagcccgtgaaatgacgcgtcgtaagggcgcgttggatttggccggt
ctgccgggcaaattggctgactgtcaggaacgcgatccggctcactccgaactgtacctggtggaaggggactcggcgg
gcggatctgcgaagcagggccgtaaccgcaagaatcaggccattttgccgctgaaaggtaaaatccttaacgtcgagaa
agcgcgtttcgataaaatgctctcttctcaggaagtcgccacgttgattacggcgttgggctgcggcattggccgtgacgaat
acaacccggacaaactgcgctatcacagcatcatcatcatgaccgatgccgacgtcgatggttcacacatccgaactctg
ctgctgaccttcttctatcgtcagatgcctgaaatcgttgagcgcggccacatctttatcgctcagccgccgctgtacaaggtg
aaaaaaggtaagcaggaacagtacattaaagatgacgaagcgatggatcagtatcaaatcgccatcgcaatggacgg
cgcaacgctgcacactaacgccagcgcacctgccttggccggtgagccgctggagaagctggttgccgagcattacgc
ggtacagaaaatgattggtcgtatggagcgtcgctacccgcgtgcgctgttgaacaatctggtttatcagccaacgctgga
agaaacttctctgaccgatcgtgaaaaagtgcagcagtggatggaagaactggtcgtgttgcttaacgaaaaagagtctc
acggcagcagctacagcgctatcgtgcgtgaaaatcgtgagcgtcagatctacgaaccggttctgcgtatccgtactcac
ggcgttgatactgattatgacctcgattttgatttcatccacggtggtgaataccgtaagctttgtgctctgggtcagcaacttcg
cggcctgatcgaagaagatgcctacatcgagcgcggcgaacgccgtcagccgatttccaccttcgagcaagcgctgga
atggctggtgaaagagtcccgtcgcggtctgtccgtacagcgttataaaggtctgggcgaaatgaacccagaacagctgt
gggaaacgaccatggatcctgatcagcgtcgcatgctgcgcgtgaccatcaaagatgctatcgctgccgatcagctgttc
accacgctgatgggagacgccgttgaaccacgccgcgctttcatcgaagaaaacgccctgaaagcagcgaatatcgat
atctaa
(fusA)
SEQ ID NO: 4
ggtgtaaaccacaagatcggtgaagtacacgacggcgcagcaaccatggactggatggagcaggagcaggaacgtg
gtattaccatcacgtctgctgcgactacctgttactggtctggtatggctaagcagttcgaaccacaccacatcaacatcatc
gacaccccaggacacgttgacttcaccatcgaagttgaacgttctatgcgtgttcttgatggcgcagtaatggtttactgtgct
gttggcggcgttcagccacagtctgaaaccgtatggcgtcaagctaacaaatataaagttcctcgtatcgcgttcgttaaca
aaatggaccgtatgggtgctaacttcctgaaagttgttggtcagatcgaacagcgtctgaatgcaactccggttcctctgcag
ctggctatcggcgcagaagagaaattcaccggcgttgttgaccttgtcaagatgaaagcaatcaactggaacgaagaag
atcagggcgtgaccttcgaatacgaagagatcccagctgatatgcaagaactggctgaagaatggcgccagaaactgg
ttgaagccgctgctgaaggttctgacgagctgatggagaaattctttggtggcgaagagctgaccgaag
(pyrG)
SEQ ID NO: 5
attctcgaagcccgtggtttgaacgttaccatcatgaaactcgatccgtacatcaacgtcgatccgggtaccatgagcccaa
cccagcatggtgaagtcttcgtgaccgaagatggggctgaaacagatctcgatctgggtcactacgaacgtttcattcgca
ctaaaatgactcgccgtaacaactttactaccggtcgtatttactccgacgtcctgcgcaaagagcgccgtggcgattatctc
ggcgcgaccattcaggttatcccgcacatcaccaacgcaatcaaagagcgcatcattgaa
(rplB)
SEQ ID NO: 6
cgttacatcctggcgccgaaaggcctgaaagtgggtgaccagatccaatctggcgttgatgctgcaatcaaagtgggtaa
cacccttccgatgcgcaacatcccagtaggttcaacggttcacaacgtagaaatgaaaccaggtaaaggcggccagct
ggctcgttctgctggtgcctacgttcagatcgttgctcgtgatggttcctacgtaactctgcgtctgcgctctggcgaaatgcgt
aaagttcagatcgactgccgcgccaccatgggtgaagttggtaactctgaacatatgcttcgcgttctgggtaaagcaggt
gctgcacgt
(rpoB)
SEQ ID NO: 7
cgtctgtctctgggcgacctcgacaccctgatgcctcaggacatgatcaacgccaagccaatttcggcggcggtgaaaga
gttcttcggctcaagccagctttcacaatttatggaccagaacaacccgttgtccgagataacgcacaagcgtcgtatctctg
cattgggcccgggcggtttgacccgtgaacgtgctggctttgaagttcgagacgtacacccgactcactacggtcgcgtat
gtccaatcgaaacgccagaaggtccaaacatcggtctgatcaactccttgtctgtttatgcacagaccaacgagtatggttt
cctcgaaacgccttaccgccgcgtgcgtgatggcatcgttaccgatgaaattaactatctgtctgctattgaagaaggcaac
ttcgttatcgcccaggcgaactccaacctggacgaagaaggccgcttcattgaagacctggttacctgtcgtagcaaagg
cgaatcaagcctgtttagccgcgaccaggttgactatatggacgtatctacccagcaggttgtatccgttggtgcttcactgat
tccattcctggaacacgatgacgccaaccgtgcattgatgggtgcgaacatgcaacgtcaggctgtaccaactctgcgtgc
tgacaagccgttggtgggtaccggtatggaacgtgctgtagcggttgactccggcgttaccgccgttgctaaacgtggcggt
attgttcagtacgtggatgcatcccgtatcgtaatccgtgttaacgaagacgagatgtacccgggcgaagcaggtatcgac
atttataacctgaccaaatacacccgttctaaccagaacacctgcatcaaccagatgccgtgtgtgaatctgggtgagcca
atcgagcgcggcgacgtgctggcagatggcccatcaacagacctgggcgagc
(sucA)
SEQ ID NO: 8
aagaccttcctcaaagaattaaccgcagccgaagggctggagcgctacctcggtgctaaattcccgggcgcgaaacgct
tctcgctggaaggcggcgatgccctggtacctatgcttaaggacatgatccgccacgccggtaaaaacggcacgcgtga
agtcgttctgggcatggcgcaccgcggtcgtctgaacgtattgatcaacgtgctgggtaaaaaaccccaagacctgtttgat
gaattctcaggtaagcataaagagcatctgggtaccggcgatgtgaaatatcacatgggctattcgtccgacgtcgaaact
gaaggtggtatggttcacctggcgctggcgtttaacccgtcgcaccttgaaatcgtcagcccagtggttatcggttccgttcgt
gcccgtcgcgatcgtcttgacgaagcgcgcagtaacatggttctgccaatcaccattcacggcgatgcggcgattaccggt
cagggcgtcgttcag

Rouxiella badensis acadiensis Highly Related to but Different than Rouxiella badensis Strain 323.

[0091] Rouxiella badensis strain 323 whole-genome sequencing produced 72 contigs from 417 bp to 280,267 bp. These contigs were first compared to the two plasmid sequences found in Rouxiella badensis acadiensis. No contig matching the first plasmid (120,600 bp) except for a small contig that aligned imperfectly to a repetitive gene sequence, called transposase that is often repeated several times, in bacterial genome and plasmids was identified. The same analysis was done on Plasmid 2, and no contig from R. badensis was found matching this sequence from Rouxiella badensis acadiensis strain. The results are consistent with the two plasmids found in Rouxiella badensis acadiensis being absent from R. badensis strain 323.

[0092] To further compare the two strains, the 72 R. badensis contigs were aligned on the chromosome of Rouxiella badensis acadiensis strain. Two contigs from R. badensis didn't match to Rouxiella badensis acadiensis genome: contig 38 and 62.

[0093] Contig 62 is a small contig of 4.5 kb and has the highest homology (73%) to a region of the Serratia sp. P2ACOL2 genome. It contains a primase, three hypothetical genes, a transcriptional regulator and an Ash-like/host cell division inhibitor Icd-like protein.

[0094] Contig 38 contains several phage related genes. When blasted against the Genbank database, this contig shows homology to a Pantoea stewartia plasmid, that was identified as a linear phage plasmid (Duong 2018). Consequently, this contig was analyzed using the phage identifying tool PHASTER (phaster.ca). The results indicated that this sequence is related to a Klebsiella phage, and it contains all the genes necessary for the phage.

[0095] The genome and two plasmids from Rouxiella badensis acadiensis were then analyzed using PHASTER to detect the presence of phage sequences. Neither plasmid 1 or plasmid 2 contain a potential intact phage.

[0096] For the chromosome, FIG. 3 shows the three regions identified as prophage regions, with one being an intact prophage. This intact prophage is similar, but not identical, to the temperate Salmonella SN5 phage. The SN5 phage was found in Salmonella enterica subsp. salamae and was active against five pathogenic Salmonella enterica sbsp. enterica (Mikalová 2017).

[0097] The contigs from R. badensis were also used to perform a LASTZ genome alignment with the Rouxiella badensis acadiensis chromosome. The result indicates that the two genomes share 99.5% pairwise identity covering 93.3% of the Rouxiella badensis acadiensis genome.

[0098] A quick single nucleotide polymorphism (SNP) analysis from the LASTZ alignment detects 16,867 SNPs, with 4,349 of them being non-synonymous SNPs inside genes. The Pacbio sequencing showed that the colicin V production protein has a stop codon in the middle of the gene of the Rouxiella badensis acadiensis. The other proteins associated with “Bacteriocins and ribosomally synthesized antibacterial peptides” category that was listed in the 2015 sequencing report are all present and intact in R. badensis and Rouxiella badensis acadiensis.

[0099] A difference in phenotype traits between R. badensis and Rouxiella badensis acadiensis was observed. As shown in the table below, the Rouxiella badensis acadiensis doesn't produce acid from L-rhamnose, while the other strain can. This is consistent with the finding that both the L-rhamnose transporter (rhaT) and the L-rhamnulokinase (rhaB) have a gene mutation creating frameshifts, and consequently the creation of stop codons.

| | | R. badensis | R. badensis |
|---|---|---|---|
| Acid formed from: | C173 | 323 | 421 |
| N-Acetyl-glucosamine | − | − | − |
| D-Arabitol | − | + | − |
| D-Fucose | − | + | + |
| Glycerol | − | + | + |
| D-Lyxose | − | − | − |
| D-Maltose | − | + | + |
| D-Melezitose | − | + | + |
| Methyl-D-glucose | − | − | − |
| D-Raffinose | + | + | + |
| L-Rhamnose | − | + | + |
| D-Sucrose | + | + | + |
| D-Trehalose | + | − | + |
| D-Turanose | − | + | + |
| D-Xylitol | − | − | − |

The Rouxiella badensis acadiensis Produces Colonies with Different Morphologies

[0100] Referring to FIG. 4, pure cultures of the Rouxiella badensis acadiensis as confirmed by sequencing produced different colony morphologies.

Rouxiella badensis acadiensis were Tolerant to Acid Medium

[0101] 200 μl aliquots of an overnight culture of Rouxiella badensis acadiensis were added to 5 ml of Tripticase Soy Broth previously adjusted with hydrochloric acid at pH: 2, 3, 4, 5 and 7. After incubation at 30° C. for 2 and 4 h, the cultures were plated on TSA and incubated for an additionally 72 h at 30° C. These times were set based on there are the maximum times in which the strain could be in the stomach. Colony counts were performed at the end of the incubation period (22). Results were expressed as Log10 of the CFU/ml.

[0102] Referring to FIG. 5A, the Rouxiella badensis acadiensis grew at the low pH assayed.

Rouxiella badensis acadiensis were Bile Salt Resistance

[0103] Resistant to growth in different concentrations of bile salt was assayed. 200 μl aliquots of an overnight culture of Rouxiella badensis acadiensis was added to 5 ml of Tripticase Soy Broth containing different concentrations of bile salt: 0.3, 0.5 and 1%. After incubation at 30° C. for 2 and 4 h, each culture was serially diluted, spread in TS agar plates, and incubated at 30° C. for 72 h, followed by determination of CFU count. Results were expressed as Log10 of the CFU/ml.

[0104] Referring to FIG. 5B, similar bacteria counts in agar plate at the different conditions of bile salts assayed was observed showing that the Rouxiella badensis acadiensis is resistant to high bile salt concentration.

Rouxiella badensis acadiensis did not Harm Human Erythrocytes

[0105] The hemolytic activity of the Rouxiella badensis acadiensis was evaluated. Briefly, aliquots of 10⁹ CFU/ml Rouxiella badensis acadiensis was plated on blood agar base containing 5% fresh blood, and incubated at 30° C. for 24, 48 and 72 hours. The presence of hemolysis was read at the different times assayed. Results indicate that the Rouxiella badensis acadiensis did not harm human erythrocytes. In particular, the Rouxiella badensis acadiensis did not display any α- or β-hemolysis at 24, 48 or 72 hours of incubation at 30° C.

Rouxiella badensis acadiensis did not Impact Macrophage Viability

[0106] Peritoneal macrophages removed aseptically from Balb/c mice were employed to determine the viability by the 3-(4,5-dimethylthiazol-2yl)-2,5-diphenyltetrazolium bromide (MTT) method. Macrophages (5×10⁵) were settled in a flat-bottom 96-well microplate and cultured in either the absence or the presence of increasing concentrations of the bacterium (10⁸ to 10¹⁰ CFU/ml) and a supernatant of Rouxiella badensis acadiensis culture. Plates were incubated at 37° C. in a 5% CO₂ atmosphere for 24 h. The purple formazan crystals formed were dissolved with 100 μL of DMSO and the absorbance was read at 570 nm in a microplate reader. Results were calculated as the ratio between the optical density in the presence and absence of the bacterium multiplied by 100.

[0107] Referring to FIG. 6A, no change in macrophages viability was observed when they were expose to increasing concentration of the bacterium (10⁷ to 10¹⁰ CFU/ml). Moreover, referring to FIG. 6B, the metabolites shed to the medium during Rouxiella badensis acadiensis growth

### Example 2: Characterization of In Vivo Effect of Rouxiella badensis acadiensis

[0108] Rouxiella badensis acadiensis did not significant alter the host intestinal homeostasis.

### Animals and Diet Supplementation:

[0109] BALB/c mice were provided for CERELA (San Miguel de Tucumán, Argentina) from a closed random bred colony. Animals were maintained in a room with a 12-h light/dark cycle at 22±2° C. and fed ad-libitum with conventional balanced food commercial.

[0110] Rouxiella badensis acadiensis overnight cultures were grown at 30° C. in 5 ml of sterile TSB. The cells were harvested by centrifugation at 5000 g for 10 min, washed three times with phosphate saline solution (PBS) and resuspended in 5 ml of sterile 10% (wt/vol) non-fat milk. Bacterial suspensions were diluted 1:30 in water and administered ad-libitum to the mice. The final concentration of bacteria was 2±1×10⁹ CFU/ml. These counts were periodically controlled at the beginning of the administration and each 24 h of dilution in water to avoid modifications of more than one logarithmic unit. BALB/c mice received conventional diet (Normal Control) or 10⁹ CFU/ml of Rouxiella badensis acadiensis in the drinking water during 7 days. This time corresponds to the time required for an optimal activation of the intestinal immune system for the probiotic L. casei CRL431.

[0111] For continuous supplementation with Rouxiella badensis acadiensis, 10⁹ CFU/ml of the bacterium were administered. At the end of the experimental period, intestinal microbiota, bacterial translocation, peritoneal macrophages activity and histology of the small intestine were analyzed.

[0112] The adherence capacity of Rouxiella badensis acadiensis to the epithelium was evaluated by electronic microscopy.

### Analysis of the Intestinal Microbiota:

[0113] The impact of the probiotic administration with or without prebiotic on bacterial composition at pylum level (10 most abundant phyla) in 6-8 weeks old healthy female BALB/C mice was further assessed. After one week acclimatization, mice were categorized in 4 groups as follows (6 mice in each group) (1) probiotic group, receiving 10⁹ CFU per day in drinking water; (2) prebiotic group, receiving prebiotic Protocatechuic acid (PCA), 100 mg/kg body weight, in drinking water; (3) probiotic and prebiotic group, receiving a mixture of 10⁹ CFU probiotic and PCA in drinking water and (4) control group, receiving regular drinking water.

[0114] For probiotic solution preparation, overnight cultures were grown at 30° C. in 5 mL of sterile TSB. The cells were harvested by centrifugation at 5000 g for 10 min, washed three times with phosphate-buffered saline solution (PBS) and suspended in 5 mL of sterile 10% (wt/vol) non-fat milk. Bacterial suspensions were diluted 1:30 in water and administered ad-libitum to the mice. The duration of nutritional intervention was 3 weeks. Each day, mice were provided with new probiotic or prebiotic solution at the final volume of 30 mL. At the end of intervention (day 21), mice were euthanized Metagenomic analysis were performed on cecum content, flash frozen and stored at −80° C. The metagenomics analysis was run by a shallow shotgun techniques.

[0115] Permutational multivariate analysis variation was used to estimate the effect of experimental factor on taxonomic profiles. When the effect on the prebiotic and probiotic presence as separated factors was evaluated it was found that the presence of probiotic significantly change the communities' taxonomic profiles.

| | Df | SumOfSqs | R2 | F | Pr..F. |
|---|---|---|---|---|---|
| Probiotic | 1 | 0.046 | 0.029 | 0.661 | 0.621 |
| Prebiotic | 1 | 0.218 | 0.134 | 3.097 | 0.020 |
| Probiotic:Prebiotic | 1 | 0.027 | 0.017 | 0.383 | 0.847 |
| Residual | 19 | 1.336 | 0.821 | NA | NA |
| Total | 22 | 1.627 | 1.000 | NA | NA |

[0116] Referring to FIG. 7, the probiotic induced positive compositional changes at phyla, genus, or species level. The normal gut microbiota consists predominantly of two main phyla that includes bacteroides and firmicutes. Bacteroides have a mainly positive role. The intake of probiotic alone or in combination with prebiotic resulted in fewer firmicutes and higher bacteroidetes. The lower microbiota diversity and higher firmicutes level is linked with many disease states, including metabolic syndrome. In particular, a substantial imbalance is observed across four major bacterial phyla including Firmicutes, Bacteroidetes, Proteobacteria and Actinobacteria in Intestinal Inflammatory Bowel (IBD) disease that includes ulcerative colitis and (CD) and Crhon's disease (CD). In the results, the presence of probiotic significantly changes the communities' taxonomic profiles.

[0117] A negative binomial models (DESEq2 R package) for differential abundance testing of taxonomic and subsystem level 3 features was used. Changes due to group differences using a likelihood ratio test compared all the groups at once. Two taxa with significantly different abundance across groups were found.

| | | | | Probiotic. | |
|---|---|---|---|---|---|
| | Control | Prebiotic | Probiotic | prebiotic | pvalue |
| Rouxiella badensis | 1.060598 | 4.905935 | 3093.534128 | 459.25919 | 0.00e+00 |
| Escherichia coli | 283.971880 | 192.272673 | 6.392056 | 10.35632 | 2.26e−05 |

[0118] Referring to FIG. 8, two taxa with significantly different abundance across groups were found and linked to the administration of probiotic or SV. SV increased significantly the presence of Rouxiella badensis taxon and significantly decreased Escherichia coli.

[0119] Pathogenic Escherichia coli is associated with gut dysbiosis and has been linked to Crohn's disease (CD) patients, ulcerative colitis (UC). It was suggested that E. coli strains play a facilitative role during Intestinal Bowel Disease (IBD) flares and its pathogenesis. Controlling E. coli in this disease is considered a hallmark in preventing recurrence and treatment as well of IBD.

[0120] Clinical data reported that Gram-probiotic E coli Nissle 1917 is the only probiotic showing efficacy and safety in maintaining remission equivalent to the gold standard mesalazine in patients with ulcerative colitis.

[0121] The data support the use of the probiotic in treatment and prevention of inflammatory disease including Inflammatory Bowel Disease.

No Weakening of the Intestinal Barrier Observed in Rouxiella badensis Acadiensis Feed Mice.

[0122] Weakening of the intestinal barrier allows for translocation of resident intestinal bacteria to distant sites including the spleen and liver. To assess the impact of the Rouxiella badensis acadiensis on intestinal barrier integrity, the livers and spleens from the mice described above were aseptically removed, weighed and placed into sterile tubes containing 5 ml of peptone water (0.1%). The samples were immediately homogenized and serial dilutions were made and spread onto the surface of MacConkey agar or MRS agar to assess for the presence of enterobacteria and lactobacilli in the organs. The plates were then aerobically incubated at 37° C. for 24 h. No bacterial translocation from the intestinal microbiota to the liver or the spleen was observed, suggesting long term consumption of the Rouxiella badensis acadiensis does not induce inflammatory damage capable to reducing the integrity of the intestinal barrier.

The Rouxiella badensis acadiensis Did not Adhere to the Intestinal Epithelium.

[0123] The adherence of the Rouxiella badensis acadiensis to the mice epithelium was analyzed in intestinal sections taken at 5 and 15 minutes after oral administration of the bacterium. BABL/c mice received orally by gavage 100 μl of Rouxiella badensis acadiensis (10⁹ CFU/ml). Animals were sacrificed 5 and 15 minutes later. The small intestines of each mouse were removed, washed with 3 ml of PBS and 0.5 mm segments of tissue fixed in 2.66% formaldehyde, 1.66% glutaraldehyde, sodium phosphate buffer 0.1 M pH 7.4 and incubated overnight at 4° C. The samples were processed and observed with a Zeiss EM109 (Carl Zeiss NTS GmbH, Oberkochen, Germany) and Zeiss SUPRA 55-VP for transmissions and scanning electron microscopy studies, respectively.

[0124] Referring to FIG. 9, by scanning and transmission electronic microscopy, no adhesion of the Rouxiella badensis acadiensis to the epithelial cell at any 5 and 15 minutes was observed.

Rouxiella badensis acadiensis Reinforced the Intestinal Epithelial Barrier Without Disturbing the Intestinal Homeostasis.

[0125] The impact of the oral consumption of Rouxiella badensis acadiensis on small intestine architecture was assessed. Animals were fed with convention diet or Rouxiella badensis acadiensis (109) for consecutive 7 or 90 days, respectively. Referring to FIG. 10, on hematoxylin and eosin stained tissue no inflammatory foci that could be due to the bacterial ingestion were observed. This non-inflammatory effect was also observed ex vivo. Intestinal epithelial cells from mice fed with Rouxiella badensis acadiensis did not secrete significant levels of IL-6 (63.13±16.83 and 64.32±16.31 pg/ml, for 7 and 60 days, respectively) nor IFN-γ (95.62±0.28 and 99.76±3.17 pg/ml, for 7 and 60 days, respectively) regarding control animals (IL-6:46.12±0.60 and 44.32±4.79; IFN-γ: 90.06±2.17 and 123.10±26.02 pg/ml for 7 and 90 days, respectively). These results were in agreement with the fact that the bacterium does not interact with the intestinal epithelial cells, as normal microbiota does.

[0126] An increase in the Goblet and Paneth cells in Rouxiella badensis acadiensis fed animals was observed in the hematoxylin and eosin compared to animals receiving a conventional diet. Considering these cells are responsible for mucus and antimicrobial peptides production, these results suggest that the Rouxiella badensis acadiensis reinforces natural intestine microbial barriers.

Effect of Probiotic Rouxiella badensis acadiensis on Intestinal Integrity and Prevention of LPS Induced-Inflammation

[0127] The effect of probiotic Rouxiella badensis acadiensis on intestinal integrity and prevention of LPS induced inflammation was assayed. Briefly, three weeks old female mice were used in the current study. After one-week acclimatization, mice were divided into two groups: 1-receiving 10⁹ CFU per day probiotic Rouxiella badensis acadiensis (Canan SV 53) refereeing thereafter in the legend as SV in drinking water; or 2-receiving regular water. The duration of nutritional intervention was two weeks, started from four weeks old of age until puberty (six weeks old of age). To assay the acute effect of LPS on the intestine, after two weeks of intervention, each group was divided into two groups. Half of the mice in each group were injected by LPS and half of them were injected with saline 8 hours prior to being euthanized. Therefore, the four groups were (1) Saline group (control), (2) LPS group, (3) SV+Saline group and (4) SV+LPS group.

[0128] Eight hours after LPS or saline injection, mice were euthanized and the required sample, including intestine were collected.

[0129] To assay the detrimental effect of LPS on intestine and to assay the protective effect of SV against LPS-induced inflammation, hematoxylin and eosin-stained slides of intestinal tissues were provided. FIG. 11 shows the differences in villi structure between groups. Blood was also collected from mice. Samples from ileum were processed and analyzed on samples tissues were sliced in 4 μm thick cuts, and stained with hematoxylin-eosin.

[0130] LPS clearly induced inflammatory changes at the intestinal villi affecting structure and high of the villi as illustrated by comparing FIGS. 11A and 11B. The protective effect of the probiotic on the structure of intestine tissue is evident when FIG. 11B is compared to FIG. 11D. No morphological changes in the intestine of mice pre-treated with probiotic in response to LPS injection. The probiotic therefore provided protection against LPS-induced inflammation at the intestinal level.

[0131] As shown in FIG. 11, LPS-induced inflammation resulted in significant morphological changes in villi and epithelial structure at the intestine level. However, 2 weeks of orally administered probiotic prior to the LPS challenge was shown to have protective effects against the damaging effects of LPS by preservation of the integrity of the intestinal structure. Blood from these mice was collected. Orally administered probiotic prior to LPS challenged showed significant inhibitory effects on IL6 and TNF-α in female mice. These cytokines alter intestinal permeability through its effect on tight junction structure between epithelial cells

[0132] The probiotic prevents intestinal barrier disruption and inhibits LPS-induced inflammation suggesting the probiotic is a potential therapeutic agent against IBD and intestinal inflammation.

Supplementation with Rouxiella badensis acadiensis Did not Impact Phagocytic Activity of Peritoneal Macrophages.

[0133] After Rouxiella badensis acadiensis (10⁹ CFU/ml) administration for 7 days or 3 months animals were sacrificed. Peritoneal macrophages were extracted from peritoneal cavity with 5 ml of sterile PBS, pH 7.4. Then, the cells were harvested by centrifugation at 800-1000 g for 15 min at 4° C. The resulting pellets were gently mixed with 2 ml of sterile red blood cell lysing buffer (Sigma, St Louise, USA) during 2 min. The haemolysis was stopped with PBS. The samples were again centrifuged and resuspended in RPMI-1640 medium (Sigma, St. Louis, USA) containing foetal bovine serum (FBS). Phagocytosis assay was performed using a suspension of 10⁷ Saccharomyces cerevisiae/ml. Yeast opsonized in mouse autologous serum (10%) was added to 200 μl of macrophages (10⁶ cells/ml). The mixture was incubated for 30 min, at 37° C. The percentage of phagocytosis was expressed as the percentage of phagocyting macrophages in 100 cells count using an optical microscope. This assay was also performed in mice that consume Rouxiella badensis acadiensis (10⁹ CFU/ml) for 90 consecutive days.

[0134] Referring to FIG. 12, no increase in the opsono-phagocytosis of yeast by macrophages from animals that ingested Rouxiella badensis acadiensis compared to those registered in animals that received a conventional diet was observed.

Antimicrobial Activity in the Intestinal Fluid Observed in Rouxiella badensis acadiensis Fed Mice.

[0135] The antimicrobial activity of the intestinal fluids of control animals and those fed with Rouxiella badensis acadiensis was assayed. Briefly, the small intestines of mice were removed and their content collected in sterile tube by passage 0.5 ml of 10 mM sodium phosphate buffer, pH 7.4 along the intestine. Supernatant were then collected after centrifuge at 1300×g 4° C. 15 min.

[0136] Exponential growth phase suspensions of S. typhimurium and S. aureus adjusted at 5×10⁶ CFU in 20 μl were incubated for 2 h at 37° C. in the presence or absence of 100 μl of the intestinal fluids obtained from the different mice. Each incubation mixtures were serially diluted, spread in duplicate selective agar plates, and incubated at 37° C. for 18 h, followed by determination of CFU counts. Results were expressed as the CFU/ml of the pathogens after their incubation with the intestinal fluids.

[0137] Referring to FIG. 13, after 7 days, 1 and 3 months of consecutive Rouxiella badensis acadiensis feeding, samples of intestinal fluids were taken and assayed against pathogenic bacteria. A decrease in the CFU/ml of S. typhimurium and S. aureus were observed in the presence of intestinal fluids of animals fed with Rouxiella badensis acadiensis compared to intestinal fluid from control mice.

Rouxiella badensis acadiensis Administration had No Significant Impact on the Body Weight.

[0138] As some Rouxiella badensis acadiensis ingested for long period of times induce a weight lost, the impact of Rouxiella badensis acadiensis on body weight was assessed. Referring to FIG. 14, a slight increase in the body weight of mice that ingested the bacterium for 1 months was observed. However, no significant changes in the body weight was observed in animals that received Rouxiella badensis acadiensis for 3 months.

Continuous Administration of Rouxiella badensis acadiensis Protected Against Salmonella enterica Serovar Typhimurium Infection.

[0139] Referring to FIG. 15, groups of BALB/c mice weighing 26±4 g were used in the study were as follow: G-1 animals that received a conventional diet (Control); G-2 mice upon a conventional diet challenged by intragastric inoculation with 1×10⁷ CFU/m of Salmonella enterica serovar Typhimurium (Salmonella infected); G-3: animals fed with Rouxiella badensis acadiensis (10⁹ CFU/ml) the 7 days previous to Salmonella challenge (Rouxiella badensis acadiensis preventive); and G-4 animals fed with Rouxiella badensis acadiensis (10⁹ CFU/ml) the 7 days previous to the challenge and continuous with the ingestion of Rouxiella badensis acadiensis the 7 days after Salmonella challenge. Animals were sacrificed 7 days post infection.

[0140] The liver and spleen were aseptically removed, weighed and placed into sterile tube containing 5 ml of peptone water (0.1%). The samples were homogenized and serial dilutions were spread onto the surface of McConkey agar. The number of CFU was determined after aerobically incubation for 24 h at 37° C. Results were expressed as CFU/g of organ.

[0141] The S-IgA antibodies in the intestinal fluid of the small intestine were measured by ELISA 7 days post challenge. The procedure used for the specific anti-Salmonella IgA antibodies was carried out as described previously by Leblanc et al 2004 (29), using goat anti-mouse IgA (alpha-chain-specific) conjugated peroxidase. The optical density was as measured at 450 nm using a VERSA Max Microplate reader (Molecular devices, Sunnyvale, CA, USA).

[0142] For the specific anti-Salmonella S-IgA antibodies determinations, plates were coated with 50 μl of a suspension of heat-inactivated S. typhimurium (10¹⁰ CFU/ml) and incubated overnight at 4° C. Nonspecific protein-binding sites were blocked with PBS containing 0.5% nonfat milk. The samples from the intestinal fluid of mice were diluted in 0.5% nonfat milk in PBS and then incubated at room temperature for 2 h. After washing with PBS containing 0.05% Tween 20, the plates were incubated 1 h with peroxidase-conjugated anti-IgA-specific antibodies. Plates were again washed and the tetramethylbenzidine (TMB) reagent was added. The reaction was stopped with H2SO4 (2 N). The absorbance was read at 450 nm. Results are expressed as concentration (μg/ml) of IgA in the intestinal fluid.

[0143] The increase in the number of Paneth cells and in the in vitro antimicrobial activity in the intestine of animals fed with Rouxiella badensis acadiensis led as to investigate in vivo whether the bacterium can protect against S. typhimuriun infection. Mice that received Rouxiella badensis acadiensis seven days previous to the Salmonella challenge and continue with the ingestion of Serratia the days after the infection, showed a better survival than Salmonella infected animals. Additionally, when we analyzed the translocation of the bacteria to others organs, we observed a decrease in CFU/ml in those animals, regarding the infected ones in both liver and spleen (p<0.05). These results suggest that Rouxiella badensis acadiensis administered by oral route reinforce the intestinal barrier through an increase in antimicrobial peptides production that protects against Salmonella infection. By contrast the consumption of Rouxiella badensis acadiensis just the days previous of Salmonella infection was not enough to protect against Salmonella challenge.

[0144] Total and specific anti-Salmonella s-IgA in preventive or continuous administration, did not increase in mice given Rouxiella badensis acadiensis regarding to infected mice receiving conventional diet. The values obtained were: specific anti-Salmonella s-IgA 0.6256±0.05665 and 0.6559±0.09763, for infected control and Rouxiella badensis acadiensis group respectively, and 10.24±1.260 and 9.798±1.246 μg/ml for total s-IgA, respectively.

The Profile of Cytokines and Immunoglobulins Induced at the Intestinal Mucosa, in the Intestinal Fluid and Serum of Balb/c Mice of Rouxiella badensis acadiensis Feed Mice

[0145] To evaluate the effect of the novel probiotic on modulating different cytokines in the serum and at the intestinal level, 8-week-old Balb/c female mice weighing 20-25 g received by gavage 10⁸ CFU of Rouxiella badensis acadiensis/mouse for 7 consecutive days provided in 1% sucrose dissolved in 1×PBS pH7.4. Control mice received the same volume of 1% sucrose in 1×PBS instead. All mice received simultaneously a conventional balanced diet ad libitum and water. Test and control animals were sacrificed after 7 days of probiotic administration.

[0146] In vivo cytokines were determined in serum and intestinal fluid by ELISA. The number of IgA and IgG producing (IgA+ and IgG+) cells in the lamina propria of the small intestine of mice that received Rouxiella badensis acadiensis was determined on histological slices from the ileum by a direct immunofluorescence method using anti-mouse IgA FITC conjugate or anti-mouse IgG FITC conjugate. The results were expressed as the number of IgA+ or IgG+ cells (positive=fluorescent cell) per 10-fields (objective magnification 100×)

[0147] The mucosal immunomodulating capacity of Rouxiella badensis acadiensis was assessed in this study by examining its effects on the IgA and selected cytokines (pro-inflammatory cytokine IL-6 and anti-inflammatory cytokine IL-10) in both the gut mucosa and the intestinal contents. A significant increase in IL-10 was observed in the intestinal fluid of animals that received Rouxiella badensis acadiensis for 7-days when compared with control mice (FIG. 16A). There was no change in the levels of IL-6 (FIG. 16B). Secretory IgA were shown to be increased significantly in the intestinal fluid of mice fed the bacterium compared to the control group (FIG. 16C) Similarly, the number of IgA+ and IL-10+ cells in the lamina propria of the ileum increased after Rouxiella badensis acadiensis administration, while the number of IgG+ cells did not change. These results confirm that no inflammatory immune response was observed by Rouxiella badensis acadiensis at concentration of 10⁸/mouse for a period of 7 days (FIG. 17).

Rouxiella badensis acadiensis Upregulated the Expression of Anti-Inflammatory miRNAs: miR146a, miR145 in the Ileum and Brain

[0148] Brains and ileum were collected from Balb/c mice fed for 7 consecutive days by 1% sucrose in 1×PBS or 10⁸ CFU Rouxiella badensis acadiensis/mouse (in 1% sucrose in 1×PBS). Tissue samples were saved in RNA later at −80° C. RNA is extracted by Qiagen miRNeasy kit using beads, aliquoted and preserved at −80° C. The expression of miR145 and miR146a was assessed by qRT-PCR.

[0149] Referring to FIG. 18, consumption of Rouxiella badensis acadiensis upregulated the expression of anti-inflammatory miRNAs: miR146a, miR 145 in the ileum and brain. Although no statistically significant changes were observed in the expression of miR145 in ileum or brain, a trend for an increase in the brain was observed. However, a significant increase in miR146a expression was observed in ileum and brain revealing the anti-inflammatory potential of Rouxiella badensis acadiensis.

[0150] Although the invention has been described with reference to certain specific embodiments, various modifications thereof will be apparent to those skilled in the art without departing from the spirit and scope of the invention. All such modifications as would be apparent to one skilled in the art are intended to be included within the scope of the following claims.

1. An oral probiotic composition comprising Rouxiella sp.

2. The oral probiotic composition of claim 1, wherein Rouxiella sp. is Rouxiella badensis optionally Rouxiella badensis acadiensis.

3. The probiotic composition of claim 1, wherein the composition is formulated as a capsule, a tablet or powder.

4. The probiotic composition of claim 1, further comprising a carrier.

5. The probiotic composition of claim 4, wherein the carrier is a food product.

6. The probiotic composition of claim 4, formulated as a food additive.

7. The probiotic composition of claim 1, further comprising lactic acid bacteria.

8. The probiotic composition of claim 5, wherein the lactic acid bacteria is selected from the group consisting of Lactobacillus, Bifidobacterium, Streptococcus and Lactococcus or combinations thereof.

9. The probiotic composition of claim 1, further comprising a yeast probiotic.

10. (canceled)

11. (canceled)

12. The probiotic composition of claim 5, wherein the probiotic bacteria are live or dead.

13. A method of promoting gut mucosal immunity in a mammal and/or restoring and/or increasing the intestinal epithelial barrier, the method comprising orally administering an isolated Rouxiella sp., or the probiotic composition of claim 1.

14. (canceled)

15. The method of claim 13, wherein the method comprises orally administering the isolated Rouxiella sp. or the probiotic composition daily for at least 7 days, at least 14 days, at least 21 days, at least 28 days or at least 90 days.

16. The method of claim 15, wherein the method increases number of Goblet and/or Paneth cells in the small intestine epithelium.

17. A method of protecting against Salmonella infection, the method comprising orally administering an isolated Rouxiella sp. or the probiotic composition of claim 1.

18. The method of claim 17, wherein Rouxiella sp. is Rouxiella badensis, optionally Rouxiella badensis acadiensis.

19. The method of claim 17, wherein the method comprises orally administering the isolated Rouxiella sp. or the probiotic composition daily for at least 7 days, at least 14 days, at least 21 days, at least 28 days or at least 90 days.

The application's sequence listing, which the Patent Office published only in electronic form, follows.

SEQUENCE LISTING (11 sequences)

SEQ ID NO: 1 - DNA, 1548 bp, Rouxiella
ttttaattgaagagtttgatcatggctcagattgaacgctggcggcaggcctaacacatgcaagtcgagcggtagcacgggagagcttgctctctgggtgacgagcggcggacgggtgagtaatgtctgggaaactgcctgatggagggggataactactggaaacggtagctaataccgcatgatgtcgcaagaccaaagtgggggaccttcgggcctcacgccatcggatgtgcccagatgggattagctagtaggtggggtaatggctcacctaggcgacgatccctagctggtctgagaggatgaccagccacactggaactgagacacggtccagactcctacgggaggcagcagtggggaatattgcacaatgggcgcaagcctgatgcagccatgccgcgtgtgtgaagaaggccttagggttgtaaagcactttcagcgaggaggaaggcgttgtagttaatagctgcaacgattgacgttactcgcagaagaagcaccggctaactccgtgccagcagccgcggtaatacggagggtgcaagcgttaatcggaattactgggcgtaaagcgcacgcaggcggtttgttaagtcagatgtgaaatccccgagcttaacttgggaactgcatttgaaactggcaagctagagtcttgtagaggggggtagaattccaggtgtagcggtgaaatgcgtagagatctggaggaataccggtggcgaaggcggccccctggacaaagactgacgctcaggtgcgaaagcgtggggagcaaacaggattagataccctggtagtccacgctgtaaacgatgtcgacttggaggttgtgcccttgaggcgtggcttccggagctaacgcgttaagtcgaccgcctggggagtacggccgcaaggttaaaactcaaatgaattgacgggggcccgcacaagcggtggagcatgtggtttaattcgatgcaacgcgaagaaccttacctactcttgacatccagagaatttgctagagatagcttagtgccttcgggaactctgagacaggtgctgcatggctgtcgtcagctcgtgttgtgaaatgttgggttaagtcccgcaacgagcgcaacccttatcctttgttgccagcacgtaatggtgggaactcaaaggagactgccggtgataaaccggaggaaggtggggatgacgtcaagtcatcatggcccttacgagtagggctacacacgtgctacaatggcgtatacaaagagaagcgaactcgcgagagcaagcggacctcataaagtacgtcgtagtccggattggagtctgcaactcgactccatgaagtcggaatcgctagtaatcgtagatcagaatgctacggtgaatacgttcccgggccttgtacacaccgcccgtcacaccatgggagtgggttgcaaaagaagtaggtagcttaaccttcgggagggcgcttaccactttgtgattcatgactggggtgaagtcgtaacaaggtaaccgtaggggaacctgcggttggatcacctccttacc

SEQ ID NO: 2 - DNA, 1647 bp, Rouxiella
atgtcagctaaagatgtaaaattcggtaacgacgcccgcgtaaaaatgctgaacggcgttaacattctggctaacgcagttaaagtgaccttaggccctaaaggccgtaacgtcgttttggacaaatcttttggtgcgccaacgattactaaagacggcgtttctgttgcgcgtgaaatcgaactggaagacaagttcgaaaacatgggcgctcagatggtgaaagaagttgcgtccaaagctaacgatgctgcgggtgacggtactacgactgcaaccgtgctggctcaggccatcatcaccgaaggtctgaaagctgttgctgccggtatgaacccaatggacgttaagcgcggtatcgacaaagctgtcgttaacgcggttgaagagctgaaaaagctgtccgttccttgctctgactctaaagctatcgctcaggttggtactatttctgccaactccgacgaaaccgtgggcaaactgattgctcaggcgatggaaaaagtaggcaaagaaggcgttatcaccgttgaagaaggcactggcctgatcgacgagctggacgttgttgaaggtatgcagtttgaccgcggctacctgtctccttacttcatcaacaagccagaaactggcgctgttgaacttgaaagcccgttcatcctgctggccgacaaaaaaatctccaacattcgcgaaatgctgccagttctggaagccgttgctaaagccggtaaaccactgcttatcgttgcagaagacgttgaaggtgaagcactggcaacgctggttgttaacaccatgcgtggcatcgtgaaagttgctgctgttaaagcaccaggcttcggcgaccgtcgtaaagctatgctgcaagacatcgcaaccctgaccggcggtaccgtaatctctgaagagatcggtatggagctggaaaaagcgaccctggaagacatgggtcaggctaagcgcgttgttatcaacaaagacaccaccatcatcatcgatggtatcggtgacgaaaccaccattcagggccgcgtaaatcagatccgtcagcagatcgaagaagcgacctctgactacgataaagaaaaactgcaagagcgtgtggctaaactggcaggcggcgttgccgttctgaaagtgggcgcagcgactgaagttgaaatgaaagagaagaaagcacgcgttgaagatgccctgcacgctacccgtgctgcggttgaagaaggcgtggttgccggtggtggtgttgcgctgatccgcgttgctcacaaactggctggcctgaaaggcgacaacgaagaccagaccgtaggtatcaaagttgcactgcgtgcaatggaagcacctctgcgtcagatcgttatcaacgccggtgaagaagcttctgttatcgccaacaacgtgaaagcgggtgaaggcagctacggctataacgcttacaccgaagaatacggcgatatgatcgcgatgggtatcctggatccaactaaagttacccgttctgctctgcagtacgcgtcttctgtagctggcctgatgatcaccaccgagtgcatgattaccgacctgcctaaagacgacaaagtcgacatgggcggcgctggcggtatgggtggaatgggcggcatgggcggcatgatgtaa

SEQ ID NO: 3 - DNA, 2415 bp, Rouxiella
atgtcgaattcttatgactcctcaagtatcaaggtattaaaagggctggacgcggtgcgtaagcgccccggcatgtatatcggcgataccgatgacggcactggtctgcaccacatggtattcgaggttgtggacaacgctatcgacgaagccctcgctggccactgtaaagagattctggttacgattcatgcggataactccgtctccgttcaggatgatggtcgtggcattccaaccggcattcacgaagaagaaggcatctctgccgcagaagtcatcatgactgttcttcacgccggcggtaaatttgacgataactcatacaaagtgtccggcggcctgcacggcgtgggtgtatctgttgttaacgccctgtctgaaaagctggagttggttatccgtcgtgaaggtaaagttcacgaacaaacctacgtccacggcgagcctcagaatccactgaaagtcgttggcgagaccgaactaaccggaacaaccgtacgcttctggccgagcttccagaccttcacaaaccataccgaattcgagtacgacatcctggccaagcgcctgcgcgagctgtcgttcctgaactccggcgtggctatccgcctgcacgacaagcgtgatgacaaacaggatcacttccactacgagggcggcattaaggcgttcgtggaatacctgaacaaaaacaagaatccaatccacccgaccgtgttctatttctctaccatgaaagacgacatcggcgtggaaattgctctgcaatggaacgacggtttccaggaaaacatttactgctttaccaacaatattccacagcgtgacggcgggactcacctcgccggtttccgtgcggcgatgacccgtaccctgaacgcgtacatggataaagaaggctacagcaagaaatccaaaatcagtgccaccggtgacgacgcccgtgaaggcctgatcgccgttgtttctgtaaaagtgccggatcctaagttctcttctcagaccaaagacaagctggtgtcgtcagaagtgaaatcagcggttgaaaccctgatgaacgaaaagctggttgattatctgatggaaaacccgggcgacgcgaaaatcgttgtcggcaaaatcatcgatgcggctcgtgcgcgtgaagcggcacgtaaagcccgtgaaatgacgcgtcgtaagggcgcgttggatttggccggtctgccgggcaaattggctgactgtcaggaacgcgatccggctcactccgaactgtacctggtggaaggggactcggcgggcggatctgcgaagcagggccgtaaccgcaagaatcaggccattttgccgctgaaaggtaaaatccttaacgtcgagaaagcgcgtttcgataaaatgctctcttctcaggaagtcgccacgttgattacggcgttgggctgcggcattggccgtgacgaatacaacccggacaaactgcgctatcacagcatcatcatcatgaccgatgccgacgtcgatggttcacacatccgaactctgctgctgaccttcttctatcgtcagatgcctgaaatcgttgagcgcggccacatctttatcgctcagccgccgctgtacaaggtgaaaaaaggtaagcaggaacagtacattaaagatgacgaagcgatggatcagtatcaaatcgccatcgcaatggacggcgcaacgctgcacactaacgccagcgcacctgccttggccggtgagccgctggagaagctggttgccgagcattacgcggtacagaaaatgattggtcgtatggagcgtcgctacccgcgtgcgctgttgaacaatctggtttatcagccaacgctggaagaaacttctctgaccgatcgtgaaaaagtgcagcagtggatggaagaactggtcgtgttgcttaacgaaaaagagtctcacggcagcagctacagcgctatcgtgcgtgaaaatcgtgagcgtcagatctacgaaccggttctgcgtatccgtactcacggcgttgatactgattatgacctcgattttgatttcatccacggtggtgaataccgtaagctttgtgctctgggtcagcaacttcgcggcctgatcgaagaagatgcctacatcgagcgcggcgaacgccgtcagccgatttccaccttcgagcaagcgctggaatggctggtgaaagagtcccgtcgcggtctgtccgtacagcgttataaaggtctgggcgaaatgaacccagaacagctgtgggaaacgaccatggatcctgatcagcgtcgcatgctgcgcgtgaccatcaaagatgctatcgctgccgatcagctgttcaccacgctgatgggagacgccgttgaaccacgccgcgctttcatcgaagaaaacgccctgaaagcagcgaatatcgatatctaa

SEQ ID NO: 4 - DNA, 634 bp, Rouxiella
ggtgtaaaccacaagatcggtgaagtacacgacggcgcagcaaccatggactggatggagcaggagcaggaacgtggtattaccatcacgtctgctgcgactacctgttactggtctggtatggctaagcagttcgaaccacaccacatcaacatcatcgacaccccaggacacgttgacttcaccatcgaagttgaacgttctatgcgtgttcttgatggcgcagtaatggtttactgtgctgttggcggcgttcagccacagtctgaaaccgtatggcgtcaagctaacaaatataaagttcctcgtatcgcgttcgttaacaaaatggaccgtatgggtgctaacttcctgaaagttgttggtcagatcgaacagcgtctgaatgcaactccggttcctctgcagctggctatcggcgcagaagagaaattcaccggcgttgttgaccttgtcaagatgaaagcaatcaactggaacgaagaagatcagggcgtgaccttcgaatacgaagagatcccagctgatatgcaagaactggctgaagaatggcgccagaaactggttgaagccgctgctgaaggttctgacgagctgatggagaaattctttggtggcgaagagctgaccgaag

SEQ ID NO: 5 - DNA, 306 bp, Rouxiella
attctcgaagcccgtggtttgaacgttaccatcatgaaactcgatccgtacatcaacgtcgatccgggtaccatgagcccaacccagcatggtgaagtcttcgtgaccgaagatggggctgaaacagatctcgatctgggtcactacgaacgtttcattcgcactaaaatgactcgccgtaacaactttactaccggtcgtatttactccgacgtcctgcgcaaagagcgccgtggcgattatctcggcgcgaccattcaggttatcccgcacatcaccaacgcaatcaaagagcgcatcattgaa

SEQ ID NO: 6 - DNA, 333 bp, Rouxiella
cgttacatcctggcgccgaaaggcctgaaagtgggtgaccagatccaatctggcgttgatgctgcaatcaaagtgggtaacacccttccgatgcgcaacatcccagtaggttcaacggttcacaacgtagaaatgaaaccaggtaaaggcggccagctggctcgttctgctggtgcctacgttcagatcgttgctcgtgatggttcctacgtaactctgcgtctgcgctctggcgaaatgcgtaaagttcagatcgactgccgcgccaccatgggtgaagttggtaactctgaacatatgcttcgcgttctgggtaaagcaggtgctgcacgt

SEQ ID NO: 7 - DNA, 949 bp, Rouxiella
cgtctgtctctgggcgacctcgacaccctgatgcctcaggacatgatcaacgccaagccaatttcggcggcggtgaaagagttcttcggctcaagccagctttcacaatttatggaccagaacaacccgttgtccgagataacgcacaagcgtcgtatctctgcattgggcccgggcggtttgacccgtgaacgtgctggctttgaagttcgagacgtacacccgactcactacggtcgcgtatgtccaatcgaaacgccagaaggtccaaacatcggtctgatcaactccttgtctgtttatgcacagaccaacgagtatggtttcctcgaaacgccttaccgccgcgtgcgtgatggcatcgttaccgatgaaattaactatctgtctgctattgaagaaggcaacttcgttatcgcccaggcgaactccaacctggacgaagaaggccgcttcattgaagacctggttacctgtcgtagcaaaggcgaatcaagcctgtttagccgcgaccaggttgactatatggacgtatctacccagcaggttgtatccgttggtgcttcactgattccattcctggaacacgatgacgccaaccgtgcattgatgggtgcgaacatgcaacgtcaggctgtaccaactctgcgtgctgacaagccgttggtgggtaccggtatggaacgtgctgtagcggttgactccggcgttaccgccgttgctaaacgtggcggtattgttcagtacgtggatgcatcccgtatcgtaatccgtgttaacgaagacgagatgtacccgggcgaagcaggtatcgacatttataacctgaccaaatacacccgttctaaccagaacacctgcatcaaccagatgccgtgtgtgaatctgggtgagccaatcgagcgcggcgacgtgctggcagatggcccatcaacagacctgggcgagc

SEQ ID NO: 8 - DNA, 501 bp, Rouxiella
aagaccttcctcaaagaattaaccgcagccgaagggctggagcgctacctcggtgctaaattcccgggcgcgaaacgcttctcgctggaaggcggcgatgccctggtacctatgcttaaggacatgatccgccacgccggtaaaaacggcacgcgtgaagtcgttctgggcatggcgcaccgcggtcgtctgaacgtattgatcaacgtgctgggtaaaaaaccccaagacctgtttgatgaattctcaggtaagcataaagagcatctgggtaccggcgatgtgaaatatcacatgggctattcgtccgacgtcgaaactgaaggtggtatggttcacctggcgctggcgtttaacccgtcgcaccttgaaatcgtcagcccagtggttatcggttccgttcgtgcccgtcgcgatcgtcttgacgaagcgcgcagtaacatggttctgccaatcaccattcacggcgatgcggcgattaccggtcagggcgtcgttcag

SEQ ID NO: 9 - DNA, 120600 bp, Rouxiella
gaattcatcgtgcatgaaacaggctatgtgaaaagcctgttcggagagttcgttttaagaagccgttgataagtccctgtaatttattttcgtttaacgtgtaaagagtcgatttatcttctatggctagaagctctttatctgtgagaaaatcataaataaagactgcgagtattcccctatgaatacagcggattgcatacgcgcttttgctgcttctggcccccttttttgtgatcctctctcatcaacattgataaggctaaatcacctagcatagtattatgagttgtatcttgtatgttctttaaatctgtcttgaaagactgatttcgggtttctagaacatcaattctcatgtttaaaaggcgcaaaagccctttgaatcattatttagacttccaactttcatcagaatttcaatttcccgccgggctgttgggatttttctatcattgatatccctagcaatagaccttacattttcttttagatcatcgggaaacgttgtattaataatctggaataatcattataaaattcgttaattacaattttttcatttacattatcgccagacccactgtgcgtttggtatgtactttccatcaattttcaccgtatatggttttattcctccgacattatcacccgagcctgagtgcgcctgatgatttgggtggtcgccttcgtttcagattttttcagtaatttgagaatgtctggcgccgcatccagtcttttctcaatggcttttggactcatgtcttcatctaggttgagcttttcgatttttttcggcgattaacttgatgttttttcatttgtgatgtattcggctaatttggatgtgatagcatccttggtgaaagtgataccgcttttgattaaatcgtataagcctctggcgataattgatgttgcgatagcgtccatagatacctcattaagtaaaatgatttcaaccacagcaatttatcgctccttactacgattgcaattgctgtaggtgcgcggtataaaatggagttttacaggcattttttgagctgcccggtaacacaactatgctgccgtctgcgaacattgttgtaacgccgattctgctaattttatctacacaattgctgtttgatctgctccctgtacaagccggttattgtgtccagttatctcgcccttatcccccacttctgtgaataatcaacatctgatgtcattgccagctggtatggaaataacatactgtgcttatcgcgccagaaggcccttcccctgccgcagacagactggccattcagggcgtggagcagacgatagcaacacatagcgtaagaaaatgacaaggtggataactgcacgcataacaattccagccatcaaaccgagtatagcattgctatgttgtcagaacgtcaactgtacttttgccgcactttctttatctgacgctgtttccagggcggtgacggcatcttccatgctgaattctgcagagagtagtgggagcggatttattttaccggactccagccatctgactgcggtcgtaaactcatcaatgaatcggaatgaaccacgcagctgaatctcttcaccagtaaggggccaatcggataatttacctcagcagttccatgcccagctggacgataatgcctgctggacgtgtgtaagacactacagaagcgatggcagccgctgcgccagaggcttcgaagcagacatcaaaaagtccccatcggcactccacgatgagctaattatttcgtcacgcgggtcatacgcggctgaagggttctgtcgcgttaacggagtgaagatgatgaaatctgcgctacctgttttttcaggctgccagcagataaaattgttctgcagacgacaatccttcgccagcttgatgatgaagctgtcctttacggatcatgtttaccagctcaatacccgcaagtatggtctgtgcccgccggaatgatttgaatcccagcatgggtcgcgttcgtcgtttgatgttccggtgatcctgctccacaaggttgttcaaatatttgttctgcctgatcgtgatgctttcttcatcgggtttgtcggcattgagtgtggccaacgctgccgtattggcgctacttttatcaatggttaccctttctggcccaccgtggtggcgaatagccttacgaaagaagcgcagtggctgcgccggcatccgcctggcggtcagcaggaatcgatggtctgcctgcggtatcgacggcccgtacaggtatttcactgcctctgatctgatgtaggtttcgtccattcgccagcgtcgacccaccgggcgtttataccgtcggaacaccttatccaacaggggcacaggcggatgacccaacggtgaagcgtcgaatgatcaacaacaatgccgcgctcggccatcatctcttccagattacggaggctcagggaatacccagataccagcgaacacactgggcgataacatcgggggataatcaggcgttggaaagattttcggatcagggacatgtcaggcaacatcgtaaaaaacagcatgttacctgacgacgtcttaatgcgacagaaccatgcagagccgcattgcctgctgagattccgttctaggttgcacaaagcatagacggacgcgatgcagctcacaaatagcttcggcgtcgacaaagtcgttttgttactttaacgaatggacggacaaattgtggtgatatcagctttggaaaatgccccaacttttccaacttgcgtgccataaagtgagagccgccacaggcttccattgcgatggttgtagcggggcatgtcgccaaaaattcgataacttggccgggtaaatttttacggtaaacagccttgccgcgacgatcttggcaatgaatatggaaagagtttttaccagatcgataccaatgagcgcaatgttttccatgatagttctccgaatgaaagcctatcctcagcatagtaccgggaaggagggagtgaccatctcattaaacatcctacgttaaggatgtttcttatacagattgacgtgcgatgaccatacccccgcagctctgagccagcagatatcgcgttatcctgacagtccatgatggctttaattgtattctgcaaggcattctggtgtggtcgcaattgcgtgatattgaacagtccgtctgtcacatcacatcacataatgcgccacacctggaggatgcttcatgcccagactttcgccacacaggctgattcgggatggttaacctgcgcatgcagctctccggctgtttcattccttattcaactgttgcaaccgaatcgtcatgagcagatgaaggatcccatcgcaccatgggcccagaaataggtctcaataaagaccgtcagaaacttatgcaaatgtagaacgtcatgtaccaggaccgaatcgggaccgtacatcatattcagaatgaaccagagcccgccgacagccgccacaccgagtaatgacagcacacccagtcctgaacgatggcagccatacctccggcatgcgcttcgggcaggcgaaactgacgcagcgtcctgaaatcgtcggtgacgccccgaaaatccaggtacaggtatgagaaataataccgggcaccacgctgagtcagcatccagaacagcataaccacaccacaaagcaacagaccaaacccggaaatgatgtgcaggaaagtcactatacctgtcaacgaagactgtcccagagcctcagtttccgtcatgttcgaattgataatctgagccagaaccagaacggcgacaacaatatgaagtccccgaaagaaaggcgtgtcctgatggggtaacgcgcgacgaagattgacggccatagctttttcacctttaaccagtggtagttctggcaatctgacggaaaatcattaacgaaaccttaacccactctctggctcttcttgacaaccacctaaatactttagaattatctaaatttaggaaattctaaagtatttagccatgaacgagatgagtgaactgcaggccaggcggaaaacgcggccgcattgctgaaaacactgagtcatccgcaacgtctgctgatcctttgcattctgaccgggagtcctggtacagagccggagagctgagcagactcagcggactcagtgcttcagccacctcccagcacctgtcacgaatgaaatctgaagggttgattgaagggacgcgtcaggcgagatatatccgatatcacatcaaaaatgacgcgatatttgcggttgtacagactctgaagaatatttactgcccgggagaataaaatgaccactgtcaccgtgacgcctgctgaaattaatgtacagcatggcaaaccagttcttctgattgatatccgcagtcatgatgaatggcgaagggaacacatttccggcacacgttccctgccgctggaacaacttcatgccggttgcttcagtgagaccgggctgagcgaaacggatacggtcattttccattgccagagtggtatgcggaccgggaacgcggcagaaaaactcagtcagtttgtgtatccggcacaggcactgatcatgcagggaggcctcaatgcctggaaagcggcgggctacccggttatcgttgatcgccgccagccactaccactcatgcggcaagtacagattgccgcaggggcgctggccctcggcggaagtctgggcggactatttctgacctctgtgctgtatgttattcccggatttgtgggtgcgggcctgatgcttgcaggaatgacaggctggtgcgggatggcaaaactgctcgccgttatgccatggaacagagagcatgaataatttccggttcagaaagagcgtaattcagatgcacctgtagtttagaacagattttctctgagtcaggcgtccgcaatctgttgctgacggatgcccggaatgatcatgaaaaataacgtagtcagatgactctatattttatgatgtcatctggactatgttttatggaaaaaaagcagtctggaataattagcaaacgggcaattctttaccctgataagggtcagtgtggatcatgacatccagcacatttttattttccagaaccgcctgacgtactgctctggcaatatcatgcccttcactgacagaaagctcgccgtcaacttcaatatgtacatctaccagtatgagatcgcccgtttttcgtgttttcagatcgtgtactccgaggacgtcagggacagcgagaatagtcgctttaattgcagtttccatctcagtgcttaccgaacgatccatcaggtcatgaagtgcattggcggcaaaagtgtagcccatacgggcaatcagaacaccaaccactattgctgctaccggatcaagccacggaaagccaagtaaattgccgacaatccaacagacacgaccactgatgaagctgcgtcggaacgcgcatgccaggcgttggcgatgagtagagacgactgaatgcgtgtcgcgacagccagcatatagcggaaaagcagttcctttgtcaccagcgcgaacagtgctacccacaacgcaacaatatgcacctctgaaatggcttcagggtgccacagcttgccgcttgcggaccaaatcataatggacccgacaaggaacaggattgcgccaataatcaacgacgccccattttcatagcgtccatgaccataatggtgatcttcgtcagaaggcttgcgactttttttattggcgatcagaacgacaaagtccgacaccaaatcagaaaacgaatgtatgccatcagcgattaatccctgtgagccagaaaatatccccagtaaaatctgaacgcaggataacaatatatttacagctacactgatcatcgtacttttttgtgccgccaatgaacgattatgatattcgttatcattgcatttattttcattaagctccataaaacctcattaacaccccataattcaggatagcaagaataatataattcagacccaaaggtgttaaacaggaaataaaccagatcaggttcattgaacgcaattaatacgggctgaaacaggcggccttgcctgcggccattcagcgcagataatgtttgcgttaacaaaactgatatattttcttcctgaaatcaacgatacccacaaaaacacatatgatttatcatatgtgtgcatcgagattaccgggaggaaaaatgctacagcctgttcaacttttcaaaattctgtcagatgaaacccgtctggctatcatgatgcttctccgggaatccggtgagatgtgcgtgtgtgatatttgcgcggccaccgccgagtcgcagcccaaaatttcccggcatatggcaatccttcgggaggctgaactggtgctggaccgtcgggaagggaaatgggtccactaccggctctctccacatatgcccgcatgggcagcagaaaccatcaagatatcctggcactgcctgcgggaagacgttcgtcagtggctggataaatcagcggcatcatcctgctgagatgaatcgaacacattcttttaatcatatgtaatggagtcggaaatgttactggcagggagtatatttttactgacgctgatcctggttatctggcaaccccggggactcagtattggctggagcgcctgcattggtgctgcgctggccctggtttctggtgttatccatgtgggtgacattccggtggtctggaatatcgtctggaacgctaccgcgacttttatcgcagtaattatcatcagcctgctgctcgatgagtcgggctttttcgaatgggctgcgttgcatgtttcgcgttggggcaacgggcgtggtcgtctgctgtttacctggattgttctgttgggtgcggtagttgcggcgctgtttgctaacgatggcgcagcgcttatcctgaccccatcgtcatcgctatgctgctcgctctgggtttcagcaaacggacaacgctggcctttgtcatggccgccggtttattgccgataccgccagcctgccgcttatcgtgtcgaacctggtgaacatcgtctctgctgacttcttccggcttggctttacggaatacgcatccgtcatgcttcccattgatattgctgccatcgccgccactctgggtatgctgcatctgtttttccgccgggatattcctgcaacctacaacgtcactctactgaaaacacctgccagtgcgatcaaagatcccgcaaccttcaaagccggttgggttgttctggttctgttgcttgccgggttctttgtgcttgagcctctggggatccccgtcagcgctattgcagccgtcggcgcagcagtgctgttcgccgttgcgaaaaaaggtcatgccattaataccggaaaagtgctgcgcggtgcgccgtggcagatcgttgtgttctcactgggtatgtacctggtggtctacggcctacgtaacgcgggtttaacagaatatctatccggcgttctgaatatgctggctgataagggactgctggcggcaacgtttggtacgggttttctgactgcattcctgtcatcggtcatgaacaatatgccaaccgttcttgttggagcactgtcgattgacggaagcacggcgtccggcgtcatcaaggaagcgatgatctacgccaacgtgattggctgcgatttaggccccaaaatcacgccaataggcagtctggcaactctgctgtggttgcacgtcctgtcgcagaaaaacatgaccatcagctgggatattacttccgtacgggcatcatcatgaccctgcctgtgctgtttgtcactctggccgcgctggcgctgcgcctctctgtcactttgtaatgagatactgatatgagtaacataaccatctatcacaatccggcctgcggcacgtcacgtaatacgcttgagatgatccgcaacagtggcaatgagcccaccattatttattatattgaaacgcccccggctcacgatgagctggttaaacttattgcagatatggggatcacagtccgtgctctgttgcgtaaaaacgtagagccttacgaccaattaggactttcagaagagatattcagcgatgagcaactgattggttttatgctcgaacatcccattttgattaaccgtcccatagtggtgacacctctaggaacccggctgtgcagaccttccgaagtcgtactggatatactgccggagcctcagcaaggtgcattcacgaaagaggatggtgaaaagataactgacaagtcaggcaaacgactcaaataattagcgagccccattctcaggcactgaatgctgctttcaccctgagaatggtttgccgggtggtgttgaatccacgggcaacggcactgacactgtttcccgcattgaggctatccatcacagctcgcttttgggcttcagtcaacgtagacggacgaccaaaacgttttcctgatgctctggcacgcgcaatacctgagtgtgtgcgttcaagcagcaaatcccgctcaaattccgccacggctgaaatcacctgcatagtcattttcccggccgggctggtcaggtctacgccacccagagccaggcaatggacccgaatatgagacacggccagttgttcgacggtttttctaatatccatcgcattacggccaagccgatcaagtttggtgacaatcagcacgtcaccattttccatacggtcgagcaatctgataaatcccggtctttcactggccgcaatcgacccactaatatgttcctctattattcgctggggtctgactgcaaaacccgccgcttcaatttcacgacgctggttttctgtggtctgctccagagtggaaacacggcagtaagcaaaaactcgtgacatgggaaactttccgtacggaatgggtgtccgaattatagcgtctgtacgaaatggatttcacctactttcggacacattgacagggtggtgtacgaaaccgaccggtttcggtcagtgcaaatcaataactcaaatgaactatatgcaaaggaggcatttatgcatcggagacaaatactcagcagtaaagaaaaagaacacttgctggttgtgccggatgatgacgttcttctgatgcacatgtacttttgggttctgtcacattaaggaagtgtcaggtaacatgctttttttaatttttcttaccatgtacctgatcccaaatgcctttaaaagcctgcattatcccaccaatgttatcgctcagtgcgtccgcaggtagctgacttattccctcagcctgcgaaatctggaggagatgatggatgaggggcattatgggtgaccattctacgcttcacctctgggttatccgcatggtgcccggctggacagggcgttccgcaggcataaacgtgccgtgggtcgccggtggcgaatggatgaaatctatatcaaagtcagaggccggtggaaatatctgtaccgggcgctcgatactgaaggtcagacaatagatttcctgctgagggcgaagcgggatgtcgccgctgccctgagtttcttccggtaagccatcctccaccatggtgaaccggagagggtaaccatcgataaaagcggcgcaaataaggccgggctggccacacttaacgccggtaaattagcagatgaatacattacggtcagaaaaagtaagtacctgaaaaaccgagtttagcaggagcaccttaatatcaaccgtcggataaaactgatgacggaattaaagtcgttcaggcgggcacagacgagtctgcctagtattgagctggttcacatgatacgcaaaaggcaatatcagtatccgtccgggacggggtatctccggcagaacagttttatctgttgattgcctgaaaaacaggcaattcaatttttactgatctggtgccgttgatgcgacaaaccctctttattacttatttagatataagttccactcccatgcctttctgttttacgtttgttaattattaccactgagtaaaaagtcatcattttgaggtagataaaaaaacaatggcaggttctttcacatagaacatccctatatctgaggtatttgatgagatttatatggggagcaaggggtcatgtactatacaggtgaaatcaaaaacttagcataactcgaccattattactatattaatacctgatcataacaattcttatatagattaaattaaaaaaagcacatcaaacatatcctaacaaaaatgatgagataaggtataaaaatacttaggagtaaaaattaagtaagaaattatgagtgttattataattattataataacttaaaaaaaaatgatttcacggactgtgctaagtacgggtattctcagtccgcagttaacttcttatgtattaatgtagctaattaaatcgtattactttagaggttataaatggatattcgaagtcgctcaccaaatttggggacgtagctgaaatttcaaaaatactgtcaaccactcacaacaatggagagtcatttgataaagacttccatttaaatgatctgattgaaaaaccttgggggtatgaatacagagtttattgcgattgtgtttttgatctttggaaactacatatcgatgctaatcaaagtacatcaatgcattgtcatatacaaaaagataccgtgttaatctgcctttccggctctggttatactaagtttcttgatgggacaatacatcaattaaataaaggcgacagtgtatacattgagagaggtgtttttcaccaaacgatagcatcggaaaaccaagggctgcaactaattgagattgaaaatcctagaaataaattcgacttacttaggctcaatgactcttacggcagaaaaaatactgcatatgagcaaaactccgttagtcacgacctattagccccaattaaaaatataggtccaggttcatttatacgaagtgaagacttgcataagaattttaaatataaattagctaatctttcagaagaagatctttcagacgaaaactttattttcatggttggcgtcagtattgatcatcatctttcaggaaagattaatgtgttaaacaaagaagacatcaccattaaaaattacttggggcaaaagacccttttaatttcaaaattttaaatcaaataatattaataaaggattagactatgtcacagaaatcaaaagttgtaatcattacaggtccgggtttccaagatcatgatatcgtttatacttactatcgctcaattgagcaaaattatgatgtttccatcgcaactaaaaatggtgaagctgtaattgggaaatacggtattactgttccaatggataaaagatctaagcctaacatttcttttgatgaattacatgtttcaaactttgaccttgttattttaactggtggtcatgaggctccagatcgggttcgtcaagatcagcgagtcaaagattttgttaaagctatggctgttgagggtaaggttgtcgcaggattatgtcatggcccatggatcatgatttccgcagacgttttacgtgacaagttagcctgcgcctatgttgggcttaaagatgacatggttaattctggagccaatgttattgaagcagatgtagttgtagataaaaatatcataacctgctcatactatgccgaagttggtaagtttatgcgtgaaacatttgcagcggttgatcgctggaagaaaggcgaagttcttgctgaaccactggtagtataaaaaatgatagtcgctctggattttgacggtgtaattatggatggaattaatgagtgcatgcttgttgcatggaatgtgtttaacaacaagctattttctgattttaacaataaatcattaaatgaaattccagattatttcgtagatattttcactcacgctagaaattttgttcgacatgatgggcattttattattccattttacgcaaataaaaatgaagtcattgatagcaagagtttccatgagatttacgaaaacattcctgatgctgataagtcaaaattcagagacgacttcgtaaattatagaaacaaagttaaagaattattccctgagtattggattagccttcataaagaattaattgatttaaaagaaatcattgaccttgatgtagacttgagaattgtctctgggaaagatgctgaatcaattatttttcttttaaagaataaaaaatacatattgaacctagaaaggttcatggaagaatggttgaaaaagatactgtgctcaaatcgattaaaaatgattctgaaaatgacaatgaagacttattttttgttgatgataatttaaataacgttattgatgcaagtaaattaggtattcaatcgctatgggcattttgggggtttcatacccctgaacaagtacaaaatgcagacaggctatctataaaagctatttttaataatcaagaattactggactttattaagatatctaaaaaaaatgaggtaagaatataatggctattgataagaaaaaagctcttatggttatcacatctcactcggaattgggaagtactggtagaaaaactggtttttattatgaagagctagctacgccgtattggaaattggttgatgcaggttataacgttgaaattgcatcaatcaaaggaggtaaagcaccagcagatccaggaagtctaagctcgccagaggaacaacctgcatcagtaaaaagatttttaggtgatatagcaagtttaaataaagtggactcttcactctcggtatctgcggtaaatcctgacgattattcagtcgtttttttaccaggggccatggtactatgtgggatttttctcaatctaaagccctcgcaaatttaattagtcgtagttatgaaaatggcgcagtaattggaagcgtgtgccatggggcggcaggtttgttgaatgccaaaactgcagatggttatcctcttgttgaaaataaacgcattaattcatttactgctaatgaagaaattgcagttggcctagatcaagttgttcctttcattttagagacggaatttaaaaagcttggcgctaaatatgaatgtgctgaaaactttaagccttttgtggttacagatggtcgcttggtaactggtcaaaacccagcctcctcagctttagtggctgatgcagtagttagcgcagctcaagtagcataaaaaataaatatttattaaggactatttaaaatgaaaaaagaaattttagtaggttttggtgtaggtgttgatgcagtctctggatggttgtcttcatatggcggcgaggattcacctagtgatatttctcgaggtatgtttgccggtgaagtaggtacacctagacttttaaatctttttaagaaattcgacataccaacaacttggtttttgcctggacattcaatagaaacttttcccgagcaaatgcaggcagttgttgatgccggacatgaaattggtattcataattacagccacgaaaaccctatttcaatgacgccagagcaagagcgaattgttctgcagcgtagcatagagatggttacaaaacttagtggtaaaagaccgacaggttatgttgctccttggtgggagttctcacctgctactacggatttattgttggaacatggaattaagtacgatcattcacttatgcaccacgatcatctgccatattatgtccgtaaggggatagctggaccaaaattgattattcaaaacatcctgaagagtggatgaaacctttaatccgtggtgaagaaacggacttgatcgaacttccagccagttggtctttggatgatattccaccatttatgttcatgaaaacgaaaccaaatagccaaggttttatgaatcctcgtgatgttgagcagttatggcgtgatcagtttgattggctataccgtgaacaagattatggtatttttacctttactattcaccctgatgtatctggccgccctcacgtactgatgatgcttgagcgtcttattactcatatgaaaggacatcccggagtgaaattccttacacttaacgacatagctgatgactttgccgaacgtaatcctcgtaaaaaataaatcatagaatacggccttaaacaaggccgtactcatatcagctatttttgaaaatacctgtatctgaaatccttataatgtgttccttaacgaacatgacgctaggctgacgtaaagctgactcattccatacaagataaatttcattttccggcattttctcagtaatgttgattttaacaatccttcctgcatctatttcttcttggcacaaatactcaggcataactgtccaaccgctatgttctctgagcattcgttcaataattcttaaatcgggtacagtaatagagggctgcatatctgtagctataccaaaaatttttttgaaaacatctcgaataagcggtagttgttcatcatatgcaattagcggaaaactttctaataattcagctgtaatcgtttttcccttaaaatctgccgccattgtagccgaggcaacaattatgagtttttccttacctataattttaaaaccatacttttgcgtatcgggttgagatgtagttattgcaatctggcttattccctcattcaagcttgaataaatttttgctctatcgccagtgagtaacttgaagcgtaattcattacgaataactggggaaaataattttgcggctttagcccaaagtagttctgcaggcccaataattgtaacaaccccagttattcgttttctacggtcacgcatcaaagtaagttttgtttcaatagcatctaaattatggccaatttgcttggcgagttcatcagcttcagctgtcggtgtaactccatgtgaacgacgggtaaagaggacgcaaccagtgagcgactcaagtgaatggacgtgtgaagagacagcgggctgactaatcccaagtcggtttgcagccttggaaattgaccctgcgcggtaaacatcgagaaaactccttagttgaaccagataactcattttttatcctttgattaataagatctgctgcgacttaacatttacttcacatgtgtatttgtatcgccttactctatgaaaaaccagtgatatagttattattatagctaatataaattttaattattttacttatatcatgggggcattaaatttgattgacaaagactgtgcaacataaaagcacatacattttaaggaattaatatgcctattgttatttatatcttctctctttgtgcttttgcattgggattaacggaatttttagttattggtttagtttcagcaatttctaaagatttgcattcgtcgattgaagctgtcggcatgactgtaacttcatatgctattggggcgacgataggggctccatttttaacggcattgacttcaaactggtctcgtaaaacagtgatgctgtcaaccatgttggtattttctgttgggagccttgctgcaactttatcgacaaatgttcatatgatgctcatttcaaggtttgttgcaggtttagcacatggcctttttttggcagttgcagcaagcgttgctacacagattgttgctccagaaaaaagaggaactgccgtatcctatgtttttgcaggactaacactcgcattagcatttggtgttccaataggaacatatttgggaagtgttatttcgtggcggcttagttttatgtctgtaacaatatgtgggattgtaggtcttataggattgatcttctttatgcccaatacaaaaactcatagtattgaagacaccacccatcctttcaaagccttaacacagatatttaatcctgttttattatttggagcattaataactgttctaggatatacgggagcatttacgctatatacctatatttcacctttgcttttggatataactaaggtaagtatacaaactgcaagttcaatgatgctaatctatggtatttgtgctgcagtcggaaacattttaggaggaaagttatccgataaactaggtgttgataaagccgttgcatggattatgtttttattaaccttatccttagttgggattaacttttatggtatgaatacaataattatgtgcattttaatcggtgctatgggtgctatatcatatgcagcagttcctgcaatgcaggcaagggttatatctattgctcatacttatgtgccaagagcagtacccgtagcttctggactgaacattgcaggatttaattcaggtattgcattaggttctttactgggcggatttataatcacaagtgttggtgtacgctacctcgctattggtggtgcatcgatctcttttatagggttatctattttaatattttcaacattatcgaaacgtcagccttctcattcacagtgaggcctttatggcctctaaactcatgatcactaatgtcctttgtgagttcaatatattgactatgcttaatgttattaatcagatagggaaggacaagatattgtttttaggtcaagggataggtaaggcatgggaaaagaagcgcgaaatgttgttaccagtttagactactcgatttaacgggccggtgagcgttaaattaaaaacagatcgaatcggcgttaacaatgatgacggtgggtggaaaggttgcttgcggaaacctcattactataatcctcttgcaacggtagattacggtaatgtggtcgatgcaactgttcctgatggtgatttgacattaagggttccgtttggaaaacggagaatatcctaccctaagcctgtttattaagcaggcatgataggcagttttgctctgtgaaagcagacgttgaattaactggattatagaaaatccaaaatatgacaggtcctgttaagcgggatacttacatcaagttcacaggaggttgtaaaggttaaaaaatgtacttagcgtgcgttttcgttcagttgtgcttcaacccttcgtaatgccgacctttgaatgggttcatgtgctgctccttcaactaaacagtggcatcagtttaccatcgccagatctttgcaacagtgccaaaaaaacaaccttaacgtgcaataattttcgatatccaaactgacccctttctggttgtaccttatgatgaggactttctgacgcgcatgttttttggaatagttactgcgttatacaatccgatttactatgtttaacggaaaatttatccctataaaaagaaaacataactaattttgttgcatacttgtctacagtaaatcgatgaactattcgttaatgattgtttttattgagtttgatcatagaagtagctggttatgtcgcgaatattaacaaattaatttaaatagttagattatggtgaaacgatataatttttcttgtaaatcaatgcttatggaaatctgggagtcttgaattggtcgaaccaaaagccttagcgtgcgaacactgtcaggcaacaaccgggctagtgctgatgcccactaaaactgaaagattcaacgctgaacgtaatgagtatatcgagatcgataagaaagtgatgttttgcttaagttgcaggaaatgcaccacagtgtcagctgcaaacaacatatctatctcatagtgctcaacagccagaaataaggctctgagtgacttgtaacgccctggatttgggtttgacagaagctcaccgcaagttctatcacaacgccacgatctttgtgtgagcgtgcccggcgaagccggttcggatgttaattaggtctccccccccttcctgctaagcaatgcagacttaccgcgataaatttatacattgcgcgatcggagtggcctcggcaaagccggggcgtatctccgcgtgcgaccggaacgggagcttacgagcgtgtattccttagttacagcatcatcataatgaaacgactggaatagctggaaccacttgcccgcctttaggcgggtgctatctataagccgctttgcggcgttatacatccggcaagagctttgctccctgcgaggttgagcgtaaattttctgtccacaggacagaacttgaataggtattttatttaatagataaagatttaagttctttaacagatttattgcggttttaagtctccacgagtgtaaccttactgggtatctctcttgcagttaaccttgagtaactagttgatgatccaaaactggcctaagttttcgatttcacggtatgaaaaacagggaacactaagggagcgaaggctgaaatattgatgtgcgggtcataattcgagctatctgctcagttaaggcgtgcgtggtcctgaagtgagggttaaacaggtaaaacaggtaaaacagctaagcgtgaatagtttccacgagatattatcattcgttctttcactcgccttttaacctcatcaaggacggcctgtctatccgctgggaatgtgcctcgagatatttctcgagtaatttgcagacgaacactattggtgacttccgcatgagaacgctcagcatcgcgttttgcttgggcacgtttctcaccctgaactttacgtttaaggcgatactctttaaatcgttgatggaagccttgccaggcttgactgaccaggtcggcgatctctaatcgcgcgaggcctttcttctcacgttggctgtttttccattcggctctgctacgtcgcgcagcttttactgcttccgcagagatatcaagggcgtcaaaaaatgcggtagtaagggtgatgtcagttggaatatggcagccgatttgcggatcgaacattggttcggaataggtaatcaaaccgaaatcatccgcaagagactggagcgcacgagtacagcgtgtaatggctagatttcctttacttgactctgtggccaagccacattctatggccagcgttgttagcgttgcattgacacgattactaagcggatcgtaatgaaaacacatagcctgaagcagcgcctcgatggctcgcactctcagtaccggtggtttgcgaaaacgtttacctatagatcgagcgaaggcgacatgcagagaaaaatcaaaacgggatgtgagaccggcggccttatccattagcttacggttaaacgggagtgttgccttatcctgtccgtcaccattttttttagggacaataaacttaggaaatggattcttaacctgtcgatactgttggtaaagattagtggattggtcagacaccaccgcccgcgcttatggcgagaaagggtcttaatacttgatttgggattaacataaggtataattcctttagtaacaccgttattagaaaaaccccttttcatatcgcctcgccaaagttgatgatgaattggggttttttgctatctggctttcgccattccctgaacgacttaccgggtcgccctgccgcataatttattgcctagatcaggcttaacttaggtaggaaaataccacgctgtttcgagccgatcaattgataacgcaataaaattgcgagagcgcacaaataatcgccagaaattccttcctcatgaagatattcatcaagaaggagcttaatagtaacccaataataagacttggtgcttactcttcgattgcattcacaacaacatcaggaacggttgggcgcccgttaacaaagcaagtcgctacaaaagtagcttcagaacaaagatcgccattgaccgtgatttgctggacgaagttaacacggtttcttttttcattcttcataagcttacaagtaacttccatatggtcgcctttcttgaggcttttacggaaattaagcttatattccagaatcatgtgtgtgcggccttctttgaactcttgctcaagatctaagccaagagattccttcatgaaagcatgacgagtccactccatgtagaacgggtaatacagtccatcgacaacaccttgaaaatcaacgtgtttatcatccacttcgtattgtttcgcaaacatcataaatccttaaaaaagtgcaacatcgtaaatctctgcggcaggataatatcctcaaattcctgcttagaggtatccttaccagtacaaacatttatagccatgctcatatcatctgtaatgccataaatgaaacttataccatgatagatattatgatttcttctttcaatgtctattaaattatcaggatcatgttttagaacatcatcccaaataacggttgaaacatcgccagccttaattttagtcaattcaagaccaacttgaatcaacgtactatcattatatttcccgccataataaaatttaacatcccatccgttatatccattactctgatgtgcagaaagctcattgttttccaccaaaagcgtagacacataagtcacagttctgacgttatttaaaaacttaataacttccgtactgcaatcattaaagtctacttttactttttttgtatccactttattttcctacactctaagatatcttcttttttataattaacccttcatttcctggtatgaaaatactggactcgtccaatatagaaactttgcctattttaacgcctgacttatatctaacataacaaagcttattattattttcttcaatggaattatggtttgaaataatacaaaactctccaaagcttacaaacgggtcaccgtatgcaccgccaacctggataagttctacaccttcaattgttttactcgccatgatgaaaagggtgtcttcatcaagatttttatattcggcaaactgtggagggaaaccttcccctttcaatatccattgagcctcaacatgcagaccgttatctctgaaaaattcagcaacaacgtcaacaagctctaacttacgtacaggaacagcactacccgattcccagcgtgtgtatgagacataagataaatccccaccctttgattggatataattcaccacatcgtgctgtgaaacgccggttgcagccctgcaacatttcagtctcttggcaatggtatcaagcatttttgctccaaaggcagttttcaattacagggctgattttaaaggaaaaaaaataatttccactcgttattatgttgcgatataaaattattaacgtaattttattgcgttaatttcctatcgtatgttactgtatggctctcgaactctatcattgtaatataataacacagtgatggtcgccatcgttactcggcaacaaaatctaacccttagaaacatttcttctacggcgaagaaatgggcgagtgttctccaaaggaagccatcacgatgaaaaattggtatctccttcagtgccaaacccaaaatttccaaaaggtcgtaacaactctcgattcgttcggcattgaaaactatcatcccctggaaacaaaaatatccaggcgtaaggattgcaatagccaaaggatcagccataaaccgctttttcctggttacctcttcgtccgtatagatcctgaaatcacacacacttccaaaataaccgatgttcctggcgcgtctcattttgttaaatttggtcaaactccacgaccaattccagatgatgtgattctcgcgctgcaatgtgccccattacttataatgaattctgacgataactctataagttgcaggaacctcccaactcagattagcgataaaataatttttatttataaaattaagaatagctttgaaagacaggtttcacttctcaatttcttagagaaggacctatccgtacataaattcacaacagagggtggcaaggtattttcagcaatgccaacgcatacgcctcatcttcctctaacggcttaaggaacaagaacaggagatattaatgtcccttccagaagaatctacatctcgtgttatatatgttggcatacctcgtagacgtaaaattgaaaaattggcaataaaattaagtgctatctctggtactcaaataaccgctgctcaactctcccaagatattatcgatacctatttagaagcatatgaggcaaaaatgcttttagagatacaggtccgcgaagagtaatcgtagttttacagcaaatttcatagttcccgcttagtaattttcaataccgctacataatcctttatccctcgtggagaatcccatgaaaaagacccttgtactgcttttccccgcagtactggcaggctgtgtctctcatctggacactaaagatgccccggcatatgtgtatgtagatgggctgatcgctgacagcgcggcaacaataagccatacgcaaacagctttaaatcaaacgggtccctggcccattaaaccaacgtcaccaaccacaagaataactattcccagcgtatccgtaccagtatctcgtttgccggtatctcctgctgtaccggccgaaccaacattaaatcatgtggtttatagtggtcgccctggtccgctcaatttcccgccgcgccggctacgttcgtaatattaccgtcgcacaggccacacagcgcatcgtgccgaacggctggagcatcagttgggcaccgggtactgagaaagcaagacgccagcgcgtcagcctgtcccttgacgaccagtggccgcgtgttctgaatatgctgatggccgataagtcactttattccacggtagattggtcagtgtcacgcgttatcgtctctctctacaatccgcatcctctctttggcgggcactgaccggagggcacatgaaagctctggtactgttaatcacgaccctgctttttctgccccaggcaaacgcattctgttttaactacgcggccgcgcgataccaccaaaacccgctgatcgtcgagtcgatcgccatctgggaaagcagcttcaatccccaggcaattggtaacaatcgcgacagcgcgggcaacctgctcagccgtgactactgcctgatgcaaatcaacaccgggaacgtggatctgctcaaaaagatgggcatcatcaattctgcccaagacttgctgaatgatccctgcctttgtgtgcaggcgggcacctgggtgctggcacgccatctgcaacaatgtggcaatacctggagttgtctgggttcctataacgcaggatttcgcaacacgccggcacaggaaaagaaacgcctggcctatgccacccaaatccacgccatctatgaccgtcttctggccagaaacctcaaactggccaaccgttaacgtctaaggactcttcgatgaaaaaaacactgtgggtcacggctgtggccacgttgctcctgtccggctgtcagcaaccggtggccacgcgcgtcacgcaggcaccggttgccccggaggccgaggcggccaacgcccagcgtgtggccgtcgtccgcgcgcagcaatatcagctgtgggatgagaacgtggtcaacacccgcacgccgctgccggcagacaccatttattccaacagtacccgcgtctcgcttgactgggacggcgacgcggtcgagctactcgcacagctggcgcgccagcgtggcctgagctttaactacagcggcgtgcgcctgccgcttccgctcaacgtgcacgtgcgcgacatgacgttccagaacctgctgcgcatcatcgtgtcgcagacccagtggcgcgccacgctggagcagaaccccggccagctgcagctgaatttcatgcctatcccgaaaccccagcctcaaccccggagaatgcgccgatgaaacgcaccgcactcgccctgctggccatgttgctggccgggcccgccctggccgaggatacgccgcctgacgccgcccgcccgatatccagcactacatggacgccggcaacggcgacaaaaatgacatcaccgacgcccgcgccgacatgatccgccaggccggccgcacggtgggctatcagggcggcaaggcccagcgcgcctgggaactcggacaggcgctcaacacccgtaacagtacgctgaacgcgctctacgattttcgcacgctcatcagcaacgacggctggctgccgccgatcattgacgaagcgcaagacgtggcgcacatcaccccggaccagatccgcaccgccagccatgtgtatcagataatcgcccccgaacggtttgtcagtaacccgccgtcctggcggtcctggctgctggccggcctgggcacctcggcggcggcgggaccggccaacggtatcctgcccaagaccggcgaggagaaaaaaatctggcacgcggccatcgaaagcggctggctggaagggcgcgccggcgcagaccacatactggaagccaatttcaatcgcctgacccgcgactatcgcggcatggtgctgtactccacgctgctgcgccagggctttatcagccgcccgcgcgtgtcggacgaagaacagaccgtgaccggcaaccgtcagaaactggtcaccggcgaccgcattcgccgcatccgcgagcacgctggctttacgccggacaagcgcgcctggcagccggttatcaacacggagtcgcaccatgaacccaaccagtccttctgatttcgagccctttgcgttcaagggcgccattgacgtggagggtttcaaacacttcctggtctgggccgcctcgcagaatgtcagcgacatccacgtgcagggtggtaatcagctggtcgtcagccgccacggccgcctgctcaacgcaagcacgttcaagctggctgacgatcagctgtccaagctgattgacggggtgttcagccccgaggtgcgcgcgcagatacgcggaggcgaaccccaggaccgcccgctgcagctcgacggcgacatgcacaatcgctacggccttgggcgcggcgagcgcctccgctttcgctgcaattttgtgcaggccacggcgggcaagattgataccaccacggccctgaccatgcgcgtgatcccgaccgatatacccgacctggagaggatgggcatcgagccggacctcttcgaggccctgctgccgcacaaggggctggggctggtcggcggagaaaccgggtcgggcaagagcacgctcctggcggcggtgtaccgctactgcgcggaccgcttccccgaccgcaaaatcaccaccgccgaggacccggtggagtacatcattgcgctgcccaaggacgtgctgccggcgacgcagctgcaaattcgtcgcgacgtcaaaaactacgccgacgccctgcgcgccgcgctccgccgtgccccctcgatcatcggcatcggggaaatgcgcgacctggagaccatgcgcgctgccatcatggccgggcagctgggccatctgtgtctgagcaccctgcacatccattcgccgggcgagggataagccgcatgttggccgagttcccgcacgaaattcgcgaggccatggcccgcgatctgctcgggtattgcagtacatcgtggtccagcggctgctgcgaaccaccgacggcaaacgccttgccgtgcgcgaatacgtggtcatagatgatgcgatgcgcgacgtgctggctggcatggatcacacgcgttggggccaccacattgacgccacgatcaagcacgaccggggccgcatcgccgacaaagcgtttgcgctgtacggtgccggacgtattgaccgcgcggaaatgctgacggtggtccatccctgccagctgcgcgacatggaggccaccgcatgagacaacgtccctcctactggcgaaacgccgggcgtcgcatgacgatttacggcattcccgcgccgctgtttctgctttacctgttctggtgccgctggccttcaatggtgaccctatacgcctgcaccggcgtgctggcctgctttgtgctgctgtcgcgctacggctggacgctgccggtattgatgcagcgcattctgcaccggctacgcggcaacaaagtgtcgggccgcccctggtggtttcggcgcttctatgactgacattcattgaggagagacgcatggcgcaacatgacgccctgaccgaccgccggatttggctggcggtaccgcatgaagaaaaggatatggccgtacaacgcggcggcaagcaggagaacggccaaaactgtattcattgggataaggaggccaaactctggtacgccgaccccggcaccccgcaggcgaacatttcgccctggctaccggacaccacggcgcgcgcgaccgggtccgccgaccccgcgaggagtttggccaggcgctgcaggcggccggtctgatactggacgggctgcccgtcatggacggcaaagtgcaccgcgtggccactctggaggataaaaagggcaaaaagaccggcggcgcctataaggggttcaatgaccgccgtcccggcggctggttcgtcaactaccaccgcgccacaaacgagaaagaggtcaccaactggaaggcgaccggcggcgagaccgacgcgctcacgacgttacacattcgcgccggggcacgacaggcggcggacgacagcgaacgggcccgtgagcagaggtatgccgagaacgcacaaaaggcccacgggctgtatgcgcgactcgacccggccacgaacgcgcacccttatctgcaggccaaaggcgtgagcgtcgacccggcgctgcgcctgacgcacaacaacgccctggtcattccctttagaaatgtggacggcgagtttcgcagcctgcagtacatcaccccgagggggacaagagcctgttcaaggaggccccaaggccgggaacttcttcgtcaccggcggcgcgctggaaaacggagcccccgtgctttacgccgaaggctatgccacggcgcgcagtctgcacatggcgacgggcctgccggtcgtcatgaccgtggacgccggcaacatgcgtacggtcgccgagatcctgggtgaacgctatcccgacagcccgcatttctttatggccgacctggaccacgccaagcaggacaacaagggcttgctgatggcgctggacgccgccgcgcgggtgcccaacggtgcggtgttgcccccgatttcaccgacgccgaaaaggccacgggcctgaccgacttcaatgacctgcaccagtcgcgcggactggaggccctgagcgacaagctcgcccgagacctcgcccaacatgccgcatcccagccgaattcatcaccggaggacaccatgagcaacgcctcagagcacgacgcggacaaaccgccgcaggcggtaccggaaaacgccacgccggcacctgcacagcccgtacaggcagagccggaacctgacacagcccagcccgcacctcagcacgacgcccctgaaaagcgcacgcaggccgggccggcgcccggtaccgcccagaatgaagacggctttgccttcggcccgcgcgtccccggcggcgacggcccgcagccggcggcgacgtcgcccctgatcgacaccgaccggctgctgcagcgtgtcacctggaacgaacaaaagggttcggtgcagtacctcgtcgaccaggtgccggcctttcgcgaccacggtaaccggatgaccatggaatcctccgagtccagcaagaacccggagcacgtcatggcggctctgttgaccgccgctcgccactacggcggcaagctggaaatcaccggcagcgacgagttcaagcagcgcgccattgacctgattgccagccacggcctcaaggtcaccatgaaaaacccggcccagcaggccatgctcgatgacgcccgcctgcaccatcaggccgaaaacgtcgcacgcgacaccgtgcacgcctcgcccgtcacgccggacgacctggcaaaccgagccgaacacgacgaccgggcgacgcaggcaaacggccccacggcatcttctgccggagcagacgacgggcatgcgatgctgcgtgacagcgggcagcgagcaccgggcgctgcggagcaagccccgcgcacagcggacaaggagacgctggatttcaaacaaggcgtcaaggggcagattgtcgagcacggcccggccccctacggcttcgacaagaataacgccgacagctatttcatccggcttcgcaccaaaagcggggtcaaaacggtctggggcgtcgagctcgagtcggccatgcggcaaagccgcgtctgcgagggccaggtggtgaacctgcagctcatggacaaaaaggcggtaaacattcaaaaaccggtgcacgacgaacagggcaagctgctgcgctatgaggccgccaccgtgcaccgcaacacctggaaaatcacctcgatgaccccggtcaacgtcaggccgcacgacgcccccacccttggcgagacgctgtcggcctatgacctgcgcgcctttgaaacgttgcaggataagctgtcggtcaaggaattgatggaacatatccccgagatcccgtccaccaaggaccgcctgctgtgggtgcgcggcgacgggcgcggcaccaccgagcggggcgacgcccttaccgcgcagcggccccgtgaagacgccaacgccggcaagccggtgctgacctcctggaccgaggacgggcgcgtggcgctcacgctgataaaaggccacggcccctacctgcagggcctggcgctgattaacgaccgctatcaccacgtgctcgcggccttgcccggaaagcacgagggcccgaacctgatcattaacgccgtcacggcagaagggctcaagtacgtgggctacggccgtgccatcaacaaggtggagggtaagccagtccagcgcgacgccctggtcttcaagctggccggcgacccgctcgacacgacgcgcatcgccaagctcgaccgccccgaacaggtcccgccgcaggtgcacgccgccctgggctttgacgagcgattcagacccgacacagaccacccaaagtccgcgccccgggccgacaatcatcacaaggccgcgccgggcgcgggacgtccggggtaagtagactcaccagaccatgaggaatgtgccatgcacatcaagcagaccctgttagccggggccgttgtcgccctgttcatgctcccctggcctcgcaggccgccacctgccgggccagcaccgccgccgaaaccggcagtgcgaccggctatgccgccgcccagaaagcggccgccgcctggtacacccgcgagagcagcgcgtccagcaaactgcaggagtgcctcgacaagatacgcaccctgtcgctgaccatgccgagcttcaccagtctgtccagcatcctgaaccagtatgctgaccagatttgcagcaccgccgttaccgaggtcaacagctacatcccgtccagcattgatccctgggacagcctgaccggctagtcccgcgcgacacacagccttttcccccttatggaacgccactatgaacgcatcggttacaccgggcgcgccccggctgcgccccacaacgcgcaggagtttgatgacgcccagcttgcggcctttgccgaagcccatcgcctgcaggaacaaaaaaacctcggggcggggtttgcccgcaagagcctgaccgtgaacatgctgatcggcgccgcgttaatcggctcgatagggctgaacgcctttcaggcttggcagaacgcgcacccagacaacaaatacttctcgacgcaggacgggcgcattacgcgcttctacccgctcaacaggcccgcctggtcggtgcaggacgtcagccagttcggcgccgacaccatccagcggtcgttcaccatggactttgtgcattaccgcaatcagatgaccgacgtcatgccgcgctactcagaccaggggtacgcggactactacaacgccctgaccaaatccaacgtgctggccatggtgcgcgacaaacgcatgaacctgtccatcaccgtgtcgccgggcgtcattaacagcaagggcaaactgcccaacggggtctacgcctggaaaatccagtatccggtcacactgcagctggacggccagcaaagcagcctgccggcgcagcgctacatcgtcgagctgcttattcagcaggcggacccgcgtgataaaccgctggggctggaaacgcgtcagaccatcatgatgaacgccaactaacggtatccctatgaaaacacgctttgtcatctccctgcttgcgctgatgtgcagtcaggcatgggcagccgagacgccgcccgatgcgccacaaactggctggcagcaggcggtcgacctggcgggcatgcagccgcaaaagccgtccacggccacgccgccggcaccgcctgcagcacagcccgccgcgcagtcccagccctcagcaccggccaccgggcaggccacacccgtggacggtgacgatcccctgccgccgcctcgccggtctatcaggcagcgcaggcccaggttgccccgctgtcgccgggcgaggtgcgcgaactgcgtggccagcacgaccaggtcaaccgggcgctgaaatcgcccaccatgactatcgttccgcgcatcagtgcgcagacggtcgacctgtcgccgggctccagcctgccgctggtccgggcggcggtgaattataccagtaacgtctcctttaccgacgccaccggcgcgccctggccgctcgcggccccggcgctcagcgcgaacgccaacgacttcgcggtctacagcattcccaacgggccgatcattaccctgcaggccaagcacgcctacgcttcgggaagcatcacggtgtacctcaaaggcctgtcggtgccgattgtgctgacggtgtcgagcggcgacacggacagtaaaaagaacatctggaccgtggacagccgcctggatctgcgcatcccgcgtcgcggcccacaggcccaggccatggcggcgccggagtcaaaaatcgggctctacgataacgcgctgcaggcgtttctggacggtaccccaccgcagggcgcgcagcggctcaaaaccaccggcggcgtcccggacaccacggtgtggcagatgggcgacgacctctatattcgctcgcgtgccgacgtcatggacgagtttgatcaaaccctgtcttccgccgacggcatgcacctgtggaaattgcccgtaacaccttacgttacgttttctgtcatgggacacgccgttcccctcaacatcacgctggagtaaatcatggctactgaaaaagacgccggccgcgacaagcgcctggtgctcgggctggtcgcggtcgcggtggggatcgcggtcggggccgtttatctggggtactcctggctgcattcggcccagccgaccccgtccaaaatcgacgtcagcaacgtgggcaacgccagccaccgcagcgcccccgaaacgccggcctaccgcaatctgctagccgagtacaacagcgacggggcgcagcgggcgcaaaaggataaccagagctttatcgccagcatcgcggtgggcaacagcacgccggtgaatgcaccggcgcaaaacaaaccgccgcgccccacacgccggcggcgcagacggccagggccaatgccgcgacacaaaaaggcgacggactgagcgaggcacagcgtaccgcgctcaagaacgtgatgagtcagatcaccgacgacggcacgccgcccgagcagacggcgctcctgggcgtcagcaccgaaccgggcgccgagcaaggaaaaggcagcggcagcaaaacgccgagcgcctttgccggctgggccagttcggtcgtgccgcaaacggccgcctatggcggcatcggcggcgcggcgacctccgccccggcgatcgagctgatcccggcgttcacccgcgccgcaggctccatcaccctcggtgtggattcggacaacagcggcacgccggtaatcggcaccatctggtcgggcccgtacagcggcgcgacgttcaaggcgccgcgctcgcagctggccggtgacggcgtcgtgatccacttcaccaccatgtactggaaccacaagacctacaccgttgacgcctacgccctgaaagacaccacgctgatggccaacgtggccaccgacgtcaatcaccgctactggtcgcgaattctgctgccggcgattgccagcgggataggcaaggccggccagctgtatcaggacgccaacaccgacatcctgaccaacggctacagcacggtcaccagtcacgccagcatgccgaacggcaccgccgtgaccggcgttatcgcgggcggcaccgccgccgaggcggccaacgtgctcaaacaggacgcggcgaagttgccggccacgcaggtcacggtcgacgccggccagccggtgtacatccagtttatggcctcggtcaccacggcggacgaggtcaagccacggggcgacagcgcggccacgaccaccacgacgccccccagagcacgcaacccgttaaacctaccctggccgagctgcgcgcgcagacccgcgaacgcatcgacagccagctgcccagccaaccagacgccaacgcgccggagtaaaccatgaacgagttcaatcccagttcgtcgcacgagacggaccccgtcgacccgcccgtcccgccgcaccgcgagcaaggcggcgcccgttacctgctcctcgagcgcaagtatgcctttggcctcaccgcccctggctgctcggttgtggtgttgtactaattgccatggcgctgtacctgtttggcaacgcccagccggccaaacccagcgtcaacgacctggcgggctttgacgaccagacggccgccgtgccggccccgtccgtcacgccacaaaatgcgctaccgagcgcacccgtgcgggcaggcgacggacaaatgcgcgaggacgtggccaacatggtgaacggcgtccgggactatgcccaggccaaccgcaccgccatcacccggctgtctgacgcggtgaaagtgctgtcgcaacaggtggccagcgaacagcaggtcgtcgggcaataccagacgcatatccagtcgctgaacgcgcgcatcgccgacctggaggcccagcgcgtcaacggcgccgctatgcgtccccggcccgccgctcaccgaccgccggcatgcacctcaacgccgtcgaaaacggcatggcctgggtgctgtggaaccgcaagacgtgggcggtcaaggaaggcgaccgcctgggcaacgttaccgtcaccggcattgacgcagaaaaccgccaggtctttacctcggccggcgtcattcgctaaggaggcgtcatgagtaccgatgccgtcagtgcattagtcagctttgccgacaacgtcttttccagcggcgtcaacttcgtggtggtcattggcggcctgtgcgcggtgctcggcgccgtcggcgtcctgtccaaggagtcccggctggccaggcaggtgccgggccacaacggcagcggcaaggtcatcggcgtcctgctcctgtgcggcatgctcgccgccgtggaggagatgatttctcgcggtgccagccagttcggctggtcgggggcgagtttcgaccaggtctcctacgtctccgagtccacgttcggcgtcggggcccaggccgccaacgccgtgctcaccctggtgcgcctgctcggcatgatttacgtcgtcatgggcctgctgcgcatcaagcggtccatgaaggacggccacaccggcctctccgccggcgaagacgtcggcaccggcctagtgcggttcattctcggcgtgttcgccgtgtgcagtccctatttactagatgccctgcaatcctcgctcggcatcgcgttttaacctcccgccgcattcgcggcacgtctacacaacctaaagcaaggaaacattatgtctatctctgatctagttctgaaaatgtccgttcgtacccatgaagcccgcgtgagcgtgaagaaaaaggccctgggcgccgtggtggcctttgccgccgctaacccggtgttagcgcatgccgacagcgacatcgccgccatggtcgacagcgcctccaccggcgcgtcggacatggaaaaggacgcactgatcatcgccgagtttatcggcgtcattgcggtgattgggggcttatcgccgccaaaaacaagaaggacaacccgcagatcaaaacctcgcacatcatgtcggccatcctgttcggcgtgtgcctagtgagcctgtctgaaatcgttcgccgttcacaaagccaggtcggcctgaccaacgtgaccgtcggcagcggcagctaacccctacagggcagcggttaccgctgccccctttttcccctggagtgacgcgtgacacagcataatcctttcgacaccgcctggcttgacgtcagcggcgacctgacaccgccgtcacccgtggacgcggtggccccgcagtgtgccctttgccagtggccggcggcgcggctgtttgcgatcaatcgcctgctgccggaaaccggccagaagcacaacgccgtgtgcacgtcctgctggctgtgctttaacctcgacaccccgtcggccgccctgggtgcgctgagctggctgccgggcatgacgcccgccgacgtcatcaacctgcaacgcctcgccatcatcgcctactcggccggcaacgacgcccagcgcaagcgcggccgcgacgtgctgaaatggctgctgcgccacaagaaagaggcggagcactactggaaaacggtgcgtccggccgagtttgccctggccctgtcgtgccagcaccccaccgagcgcctggccctgcgccggcgcctcgccggcacgcacctggtgatgtcagccgacgcctttaccgacctgagtttgctgctccccgccggccagaccgccggcgagctgcttgacaccgttgcattgcccgcgctgtaggaggccattatgtccaaaatcattaacgcggttgaggaggcgatcaccgccctcagccgctttgccgtgtccagcagcctgccggactacagcgacctgcgcaccgtcgtgcgcctgaccgacaccgaccgtaactaccgccccgacctgacgcagccctatatcgccgtgaccgacaagggcgactactgctcgaccttcgaggcccaaggcaacttctgcgagatggacgagcacgcgcccgtggatcagaagttctcgtttgacggcttcatcaaccgggtgaaaacggccctgaccaccgactttaaaacaccggggcaccgcatcagcatggtcatcgaaaacgacccacagctcggccgcgccgagctcgagcgcctgttcgcccaccagttccgctcggtgagccgcaccggcgtggccatgcaggacctgctcaatgaaaaaatcgataagctggccccgtgggtcagccgcgaacgctgctgggtcacctgctggagctcgcgcgccggcctgtcgtcccacgaactccgcagcgaaaaccgccgcatcgcgtcgctggccaacggcgcgccgcccgcccgctttggccagaacccggcgttctccgagctggcagggctgaaaattcgtcatgacgccttcctggacgtggtagagcacgccttcaacgacggcggcgacgggctgttgatggacctgattgacgtgccgacgctcggcaaccgcatacgccagcaggttgaccgccagggcacggccgacgagtgggtgccggccattccgggcaccgtgctcaggccacatgggcggcgcaagggccaggacgtgtcgcccttcatggcgccgtggctcaacttccaattgatgaacgtcgacgccgacgccaccgacaacctggtgttcattaacggcgtctggcacgccacgctttccgtgacgctgggcccgcagcaaatcatgagctttgccgagctcaaggcgcgcatcccgcgttccgtgccctatcgtctgcgctttgacatcatgccggcggcatggccgccctcggctggaaaaagttcgtgctcgacttctcggcgtttctgccgagcctgcgccccatctgggagtcggtggcccggctggaaaaggccgacgacaccgatccggtctgcgtgatgaccatctgcgcctcaacctggggcgacagcaaacagcaggtgcagcaaaacctgacgctgctgcaaaaggcgtttcagggctggggcgtgtgcgaagtcaccaccaccttcggggacccgtaccgcgcctgggcgtcgaccctgctcgccgcgcgcaccagcggcgggtcgcacgcgctgtacccgccgctcagcgacgcgttgagcatgctgccggtcggccgcccggcctcagcctggccggacgacgccagcgtggtgttcccgaccccggacggcaagctgtttccggtggggctggcttcctcccagcagaccaagcacaccgaaatcatcgccggcgagcccggtaccgggaaatcgctgatgcttaacatgctcaacaacgccatggtcagcaacgctcaacagcggctgccgtttatcgccgtggtcgacaagggctacagcgcccagggacagatccagcttatccgcgacagcctgcctgacgcgcgcaaggacgaggccatcggcatcgtcctacgcaaccatcccgaccactgccgcaacatgttcgacgtccagctcggcgcccagtaccccatcgaaccggagctcacctggatagtcggcgtgctggtcgccatgtgtatcgagccagtcaccggtacgccgccgagcgagcgcgacacgcgcacgctgattgagcgcgcggtgatgctggcctaccgggaccgcgcggaaggtaacacccgcaagtacgccgagggcgaggccccggacgtcgaccgggccctgcgcgagtcgggcctgctggaaaagtacgacgccgagtggtgggaaatctgcccgtactacgacgtgcgcgacatgctgttcgaggccggctacccgctgcaggcgcagcaggcgcagttcatggcggtgcccgagctcaacgacatgcaggcctacctcaactcagacgaaattcgcagcaccttcggcaacgtggcgcgcaccggcaccaccgaaagcctgctggagtacgtcagccgctgcctggagcaggcggtgtccgaattcaaaatgctggccgggcgcacccggttcgtgattaacccagacactcgcatcatcgccatcgacctcaacaacgtcatgggcgacaacacgcgggcgggccagttgaaaaccggcatcatgtacctgtttgcggggcaaatcagcggcggacacttcatcctgccgcagttccgtcacgagcttatggacgccgtggccccgatgtaccgggacatccatcaggaccgcctggaccagctggatcaggagatcaagaccaagctgtacgacgaactccacaacgccaaggacgtgccgtttatcttcgcctccttggaaacccaggatcgcgaacagcgtaagttcggtattcgtaccgtattcagctcgcagtatcttggcgatttcccggagaccatcctgaaatcggccaactcgctctacctgatgcactgccgcagtgaggacattccgctgctgaaagaccactttgacgtccccgaagtcacgataaagaagttcctgcaaatcccgaaaggcccggccccggacggcagcgggaccagcttcttggccgttttccgcaccaagcccggccgcattgcgcagatcctcaaaaacaccatgggcccgcgcgaactctgggcgctgaactcctcgccggccgacacggccctgcgccgtaagctgtatgaagagctcgacggcaccaccgcccgcgacgtgctggccgaagcgttccccaagggaaccgccgccaaggtgattgatacccgccgcaagcgcgccggcgaccgggacgacggcaacgtcaccctgcagctggccgacgagcttatccagaaccgcggctaccgactataaggacaccctatgaaacgcacactcctggcggccaccctggccgttgtcagcggtcacgccctcgcgggttacccggtttcggtattgagcagcgtgccggtcacgacccaggtcgtgccggcactgacctcgattgaaaccaccctggccgagatcctgaccaccaataccgaaatcggcagcgccattacccaggcaagcgacaaaaacagcgccgtggtcagcgaaggcttccaagctcagcgctcggcggacaacttcggacgagagacggaccggctggaaaaggcccgcgacagctttacggtcccggacagtatctgcagcgagtccgcctccggggtcgccaagcaggtgagcaacacggcggcggcggcgcagtcatcactggccagcgggtcggggatcaccaacagcgccatcaagaccgccgtgtcgtcggtcccgctcctgccggcacaggaggattaccgcagcgccgccatccacgccaagtattgtacgtccgaggaatacgcgctttacggcggcaccgagctgtgcgaatcaacgtccagcctgcccggcggcgatactgaaattcgctccgtactccagggcgcggggcggtgggcaaagacccggatctgacctttaccgatgaccaggtggatgcagccatggcgtatctgcgtaactcgacgaaacattccgtcggccgcacgctgggcaaaggggaaatcaataccgcgacgggctggcgttatcaggggctgatgacgcagtacaaagccatacagaacgccgcgatgcagccgcagctagaaatgatcgccgacagcaaacccaacgccgacaccaagaccgcgatcgccgaagcgctgcaaaacgcctcggccaagtcctattacgacgatacggcgtcaagcgaggcgcatagcaccggcgaaatgtccagccgcgagtttgagtcctttgaagtcggccggcggtacgccaacaccgactacgagacggacctgcaggccatggacggcgacaacctgatacgcgaactcattcgcgtacagagcctgtccaattggatacagctgggcattaaaaacgaaattcgtgaatccaatatcctcgccggccaggcgctcagcctgaacgccgatcgcacctaccagcccaaaatggaaggattgatgtcgcagataagtgctggagtcgcaaaatgacccatgatgaaacgccccgccagcatgagacggcgtccaaacggggcatggcgtcaaaggtaggccgcacctcttatcgcgtggccaacgtgctcatgccgctgggtgaaatcaccgggctgggcaagctcgccgcccgctcgctggggcacacggccaggcgcgtcgcccggctgcgtgaagggatacgacaggaaaaacagacccagctgacctttgaggaggcggtggcggccagcggccgcaccgaggcccagctcggccggaaatttctccacctgaaacgcctgtggtgggtggcgacgctggccggcgcccttatcacgccgctgctgctcgtcatgattgtgctggccgcacacacgctgccgggcgtgacgctgatacgggccctgacctttgtactgattttcgcggccatcaccgccattgcggcgacccgcgtggtcatcagccagtttcgacgctggcagctggccacacggcgcctgacccggaagacaggggcacctttgccgacttccgccgcgagacggactggcttgcccagtgcctgacgccgttctgagttccctttttcgcaagcaggtaatgccatgaaacgtgtaaaaacgctgttcgccacgctgctgttgctcggcgtctcactgccggccctggccgacgacgtgacctacagcagcatcaccagcgccgcccagaataccagcgacctgtcccgccaagcgctggtcaccatcttcggggacgtcgtcacctcgccgtttagcaccaccgacaccacggtgatcggctcgctgttcggcattctcaacggcgtgctgtgcgccgtggccctgttctggtttttgaccgtcacgctcaaggggattgtcaaatccgggtccgagggcaaggtgttcggcaacgcccgcaccatgctggctccggtgatgtcttttctgggttttatctccctcgtgcccaccgcctcgggctggtcgctttcccagctggtgatgctgtgggccgcctccatcatgggcgtcggcagcgccaacctgctgaccgacaaggccgtggacatgatgtccgacggctactccctggtgacccagcccacctcgcccgacacgcgcagcgccgcgcgccagatattcgagatggacctgtgcaagtacgcggtcaacgcgcagctgcagacgctgtacaacgattcgggcagcgcctcgaccgagagcatgagcaccacgtccagcgacggcagctacgtcaccggcaacggcagcgccatctgtggcacggcatcgatcccaaccactacgcgcagcagcagctggagcgttttgttcgattcggatgttgatacctcttccatcgtcgaagcacagaaaaccgcactggccaccatgcagagcacgctcgacagcgccgcgtccagtttcgtgaccagctttgtcagcaaacgggatgacggcacgggcagtctgagcgacgtagagaccatcatccagaatgcggcgagcagctacgaaacgaaaatcagcagtgctgtaaatagcctgagttatgaaagttcgctgcaaagcagtttgaccagcaacatgaagacctacggctgggcgtcgctgggcgcctggtatcagaccttcgccaccgccaacgccaagaccaacgacgtcgcggcctcggcgccgaaaaccagcggcccgaccggcgtcggcgagctgggcagcggcgagctctatcaggaagtgtttgcggcctacaaggcgcagctgcagaacagcacctataccccgacgctcggtactcaaagcgcggctgacgatatcaagagtgggactaccacagatcctaagtcggtgtttgtgggcctgtttaacagtcccatgcagcagatcaccaatggcattgccaccatgaacattggtcaagaaaacagcaccagtgaccaagttaatccattgttgcaaatgaaaaaaataggtgattacaccctagatggagttggggctgcacttaccacatatgtaggtattcagctaaccaccgcatggaccggcaacaacatcgtcggacgcataaccgatggactcacaggctggaaggccgccattgtggccgtgctgcaggccgtatccccgccgttctacttcctgctgctgatcatgttctcggtgggctttagcctggcggtcctgctgccggccattccgtttatctgctggatgaccgggttcattaactggatagtcagcgtcctcgttggctgtgccgccggtccgatgtgggccgcgacccacctcggcgccgaggaggacaagggcagccgcgccgcctacggctacgtgttcctgattgacatgatgctgcgcccctcgttgatggtgctgggcttcttcttcgcctcggtcaccgtcgtcgccggcggcacggtgttgaacctgctgtttgcctcggccatggccaacgcgcaggtcgactcaatgaccgggctgtttatcgcgctgggctggctgttggtgtactcgcgcatctgcacccacgcggtgaccaagctgtttggtctggtggtgacgctgccggattacgtgatcagtttcctcggcggacgtgacggcgccaacctgatgggcggcatggtggaggcgacaaacaatatcatcgccggcttcggcggcggggccaggaaaacgccgggcatgaacgcccaggaacgtaacaccacgggcgacaaagacgggttaaaatagcgacaagatcaacggcttatgttaaaattatattaacttaacgccctaaattaaggacacattatggttcaacgcgaacgcaccgggtacgagacagtaaaaggaatagtccaggtactggcctccgtgtttgtgatgccaccgatactattcttagcgtgttacttcactatttcctacgatcacagctctccctacaatggtagagctgaacattggaaatgggctttactgttttggatcctgttcctgacgcccatcattatgcgtctgcgcaccgtgcgtcgtcgcaaacgcacaatcaaggggatcgcggcaatggtggaaggtgagttgtattcaccggcaaaaagcaacgtggtaaccgaaggctggcaaaactacctcggcgtggacggtattcggggcaccctgctttatatgcgcatgacccgcgacggcgtctatgacgtcgtcggcctcgacatgcacgaccacggctggacccgcgtcgagcgcgtcggcgccaaaattaagctgtataccaaaatcccgaatgcccgtcgctggaaatcacggcgccgggcggggaaaatgatgccctgaaactctacgacacaatctgcgccatgcagcaccgcctctacgaatacaagacctcgttcccggcctgggttcgccaggcagcccagcaggatcaacaacgtctcggcgtgcacctcaacgcctttatctgaccgcttaacgtaactctctgaaagaaaacgcccccgtcctccgggggttttgctgttcgtctctctgacgccttctctgtgcccctactgtcctgacaatcccggagtgcccatgtctcaggtaaaacccgccggttcgtttgaaagcgaacaggcgatggtgcttatgtcgctcgccggcttcgcctttctcggctggctctggttcaacaaagtcgtactgatttcctgcaccgtgctgtactggatctggcgcctggccgatttccagcgtattcatgcctacgccgccgcgcgcatcaacctgctggccgacacggccaacagcgcggacagcgtcaccggccgccagctgctcgacgtgctcaaccacaccaccggtatcctgtttatcttccttatcccgatggttgtggccggcgtgattgggctgatcggtcacccttcgctgccctttcgcagcaagcgcgtggtcaacatccattccctgccgcgcatcatggcccgcttctcgccggccaccgcgccggtgctggccgacagcctgacgccggatctgctgatgaacgatatccgcccggaacaccgctggggcctgcaccccgaggagtttgccgccctccacggcctgattgatacccgcgtgctagatcgcgacaaggctaaagacgcatttatcgcccagctcggcgcaccgctgcagggcatggtcagctgaaagattacgagaaggcactgttcaccgtgttcggcctgcagctgttcctgaacgaccgcaaaacggcgcgccagctgctcgaccagctcaaccgctcgtgcctgggcaagcggcgcaagggcaagtcggccctgcagcgtccggcgtttgccctcgccgacaaacactttgcacaggtctggaacgcgccgcagatgcgcgacatcaacgccacgcaccgctacgtgcgcacggcgctggccggcatgctggcccacgacattcacctgccgacctcacagtttcgttggctgaaaggcatcgatcgcaccctgtggtacgcactgcactcggcggacacgcaaagcgtgtttgtcgagggcgccggcgtactggcgcagatgcgcttcgagcgcagagtgcgggccgagggtctggatctgcgcatcgactacgtcgacacggccgtcgacgggctgcagcaggacctggaaggcattggcctggtgcacgaaaaccgcaaggacgtgaaggcacagcccgccaaagaggccgactggaagcctgccacactcgacgacaaggcgtttctggggaagacgaggccagcgtggccacggcagacgacgacgcgccaccggttgcggccacagaggctgaaagcccgagcgtaatgccagatagcacgccggagaatgccccggaaccggtgatcacaatcgtcacgccggataacggcccgccgacaccgccagccgggcggaggacgatgccgttgccttcgccgacgaggatgacgaagacgaggcccacagcctgcaggatcaatatatcagtggctttaccgacgacacgccgccgatatccccccaaccacaccacgccgaccggccaccgccccgcgtgatgatgaccactttgacgaaatctaggagttaccatgaccgccatcacctttaacgccaccgtaaaaaacaaccagctcaccgcgttttccacctggcagggccgccgcgcccttttcgtggtcaacctgcacaacagcccgtcgttttacctgaccaacgccgccctgatggcccgtatgcagtacggggaggagatcctgctgtggtccggtctggcctcggacgaagccgagcgcctgctcaacgccgtcacgcacgccctgaaacaggcggcccgccgccagacggcgctgaaatcggccctgacgctggtcgcagcggccgtggtggccaccggcctttatgccggcacccgcgcgatgaacgcgcccgacgacgcgccggcgccctttgtgcaacgccaggcgtttgcccacaatccggccatgatgcaggacccggccatgcccgacctcaccgggctgcagccgcaaacccgcgtcaggccatgatgccgtcaccgcaagcggcggccccgcaggccggcgcaccggtgcccctcacgagacggcagaccaggtgcaggccgccgaatcgcagctggcagccaatctgcagaaggcggccggccgcagtctgttcaccgtcccgctgtccagcggccacgcccgcacgctctacgtcttcgccgatccgagctgcccgaactgccagaaccttgagccgctgtttgaggcgctgagcacgcaatacaacgtcctggtgttcccgacgaccgcctttggcggcgacaagtccgcgccgctgatcaagccggtgctgtgcctgccgcccgagcagcgcaaggcggcctggcaaaaactgttcgccgtgggtgacggcatgctgcacctcggcaaggacaacgccccggcggccgcgcccaccgactgcgatctcgccggcaaggcgctgggcgtcaatgatgtggcgtttaaaagctaccgcttccccggcacgccgtgggtcattgccgacgacggccgccacgtgccgcaggccgtgatgcgcaaccctgacgacatggtcaagttcatgagcgagcacccggagaaatagccatgaaacgcatgaagcccgtcgaccgcatcaagcttggtcgcaaggtctaccatacgccgctcgaagatgtggcactgagttccggctggctgacgctggctatcatggcgtcactggtcgccggcgtgatttggccggtgacgctgtgggtcgcgctgccggtgatgatgttttggctgccgacgttcctgttcaacgagttccgcatgccgctgcgcatgccgaccgacatggcgcgcgtcgacccctccaccgaaatgcgcatacccggcaagatgctggggtttttgccggtcacggttatgcgtcgcaccatgagccgcgcgggcggcattctttactcgggctacgaacgcacctttgacgccgggcgcgagctctggctgagcatggacgacctgacgcgccacctcattctgatggccaccacggggccggtaagaccgaaatgctgttgggctacgtcctcaacgcgctgagctggggcaaggggctgatcttctccgacggcaaggcgcagaacgacgtctggttcgccattgcctccttggcccgccgcttcgggcgcgaggacgacctgcgcgtgattaacttcatcaccggcggccagagccgctcgcagcgcctgctcgacaacgataagtcgcggccgcagtccaacaccgtcaacccgttctccctggcgcaggaaacctacatcatccagctgatggactcgatgctgcccgccgccggcaacgacggcggctggcaggagaaggccaaggcgatgatccaggcgctgatcatgggcctggtctacaagtgccgcaaggaaggcaaagtgatgtcgcagcgcaccattcaggaatacctgccgctgcgtgaggtggccaagctctatcagcaggccgtggccgaagactggcacgacgaggcaaggctgccgctcaagaactacctgagcacgctggccggcttcgacatggcgctgattaacagcccatcggactgggcggccgaggcgctcaatcagcacggctacctgatccagcagttcacccgcatgctttccttgttcagcgacacctacggtcacgtgtttgccgccggtgccggtgatatcgacctgcgcgacgtggtgcacaacgaccgcattctggtcctgcttatcccgcgctcgagctctcgtccaccgaggccgccacgctgggccgcctgaccgtgtcgcaggcagcgatgattttgagccaggacctcggcgaaaaactggagggccgggcccgcgacatcctggtggtgaaaaagtacaaggaccgttttccgttcctgtggatagccgacgaggtgggcgcctattacaccgaggtgtttggccacctggcgacccaggtgcgctcgctgggctactccctggtgctcgccggccaggatctgcagcgtctgaaatccgccgccggcgataaaatctggacgcttatcggcaatatgttcacccgcgtcgcggggacgctcaacgacccgaaagagacgctggagatgtaccagaaatccggcggcacggagtacaagggcgtgcagaccgccatgcagcgcgaggccggcgcgttcggcggcagcagctttcgcgacaccgaccagataacgctcaaggaggaccagcgcatcaccgtggaggaggtgcagcagctcaacaaggggagcagattaccctcttccaaggcgacgtgatccgggctcgtcgctgtacatcggcgacgacgacaagatcaccggccaggacatccgcatcaaccgctttatcgaggtggccgcgccgaccgtcgagaccctgatgacgttcatgccggtcaaggtgcgctggacggtgccgcgcaccgacgccgtgacccgcctgctcgcggtcgggctcgatgaaaacaaggggcgtcaagtcaccaccatccaagccacatcatcatcaccgacaccgtgctgtttgccgtggcccaagaaacgacctttatggacgaggttgaagacaccccgccgagggccgtcgagcgcgccacgcgcctgtattcccttgtcgccgccgtgctgggcgagacgcgcggccgctatcaggcagaacacccgcagccggcaaaaatcaccgtcaagcaggcggcgctgcagcagtacgcccgctatcaccaggccatggagcccgaaaaagaaccgggccagaagtaaccccctacgccgccgtctggcggcgtcaattcaacaacgaggcacgcattttgcgcatcaagacacttttcgccaccctctcggtggcttcactatgctctaccgccgccctggccaacccgtcggtgcaggtcggttttagcccggaaggctcggcccggaccctggtgctgaacaccatcaacggcgcgcagcacacgattcgcatgtcaggctacagcttcacggccgccgacattgccaaagcactggccaatgccgaaaggcgtggcgtcgatgtgaaaattatcctggacgccaagggaaaccgcagccgctattcccaggcagcgatgaatgttgtcactaatgctggcgtaggtgtgcgcaccacggatgcctataaaattcatcatgataagatactgattgccgacagcaatacggtggaaactggctcattcaactataccaaagcagcggaggagtcgaattcggagaatgccgtggtgctgcaggacatgccgggcgtcgccgatatctatttaaaacactgggcgtcacgctgggaaacggggaaagactggcactcaacttactgacggagcaacggatgacccgaagaacccgcaaaaaaaccttagcggcccgtgacgcgacaggcatcctgaaaatctcgacgcaggagtttgccctgttgctcggcaccgtcgaaagcgtgctgtatcgggcggccctgctgcccccggaatgaaccacacacccaccaaaggaaagtgagatgaagaagaaaatggccctagccgcgcgcgttatgtcggcctggagcgttacgggagcacaggccgacacggatgacctatttattcatgaaggcgtgtaaaaaccgcattcaattcacgcatcagaaaaacaagtaaccaacgaggcggcgtgcggcgatccgcgccctcgcccacatcaaaaaaccgcccttgaggcggtttttttttgcgttgcagacagagggaggaggaaacccactcccgcctcgttacggtttgaacgttccccgatgtgaagggttgtcatgctcatcatcgacatagtgtgtctgttcccgctgacgttgttcgtaacgggcttctgcggtcgcggcgtaggcggcattgtcggcctggtgagccctaagcgttttatcgtcctgacggatacgctcaagctgatcgtcattggtcgggaccaccatgctgtcagtgtgtacctggttatggcgggcagcagcaccaatcgccgaggcaacaaaatacccgccgccgtcaaactcaaccttctcgccagatttccacgacaccatatcgatggcaacgacagtattgatcccaccatagtcatgcgggtgacgcacctcaacggtatcgcctcggtcaatgatcgcctcacgacctttttgagagtaaaccgctgagccatcgcggtgaacgcgcacgctaaatccgtcggctttcaggaccggcgtatcgtctgccggcgcacaatagatgatgttatcgctctcaaacggcacacggtttttacgcccttcacgatacgcccagccgcgcagctggctcaccgccgcctggctgacctgcccccagaattagctataactctcagttagcaatatcagttcctgacccgctccccgtatgtgatccaggcaacggaaccatcaaccatccaaacgcatacctgaaaaacaaatttggcaatatcgataccaaaaactctgaacgtattcatgtggtgttacttccagattaattcagtccgtagaagtatggcactgactacgttagaaaggggtgcccaacacatcattacattgattagttccgtaaaaagcttgtcggatgtctcaggacgtgaaacggacaacaatgatcataatgaatatgctaacttacagggaggctgataaatatccacagccagccaatacaaaatcctatcgttcatcacttggactgactttatataattttttatagcatcttgaaaaatgtgaaaaattcttgaatccgcactgtgcagcaacagctgtgatactcaagtcttcatttctaatcatttcacgagccgttcgaagccttaacgttatcacatatcgctctggtgtataacccgtaacgtttttaacctggcggaacagcgttctccgggaaataccatgttgactgcacaataatacccagtttatatcctcgcaatgatttctacggacatcttccagaatccgctctatggcaagaacatgttcctcactgataagcacattatccacatgagtaaacagagagagcatctgcagtagcagcccttcacgcattaacgcatccgttttacacttcccaacaagttgagcatccagtgtatttaacaggttaaagaatatttcacgctctttaatgccgaggcgaaggtggctcttttcacatgcaggaaatgcactgtgcaaaatactttcaacagaaggaatgataaggaaattaacttccggtcgaatgaggatattcgtaagtccgagtgatcctgcgtttctgtagtagtgaaaatctcgattattgacgtaaaaaacgtcacctgactggatgaaatgggcttcaccattcatcacatggatcccactaccacgttcaacgataaccagctcttcaaactcgtgattatgctcggtttcatttatctcaggtaacgtccggtgaactgcaacgggctgtgaatcctgtctgaaatagttgtccggacgaatggtgtacatgtgggactcccatgtttagcgctgacctggtttcatatcgcctttaaacaaattttacaaaagtgtgaagggtattacctcgttgttccatgagtgccatcattgcaataaagatggcctccacagccgagtgcatctcatcatttcacgatagaactttaacatcattctggcagggttctacatcatgaaattgagcgtgaaaacgaaaacgtgctttggcttcggcgcgtttggcaaagacatattcagtgtagtcgtgatgtcgtacatcatgattttctataccgatgtttttggcctgacagcctctttcgcagggatggtactactgataacccggctgattgatgctgtatcaaacccattcctgggcatcatgatggacaaaacatctacgcgctggggccgcttccgtccctatctgttcgtggtgcccattccgtttgcgatgttcaccgtgctgatgttctggcatcccgacatgtcaccgataatgatgtttctctacgccctggtgacattcaatattgctggcctctgcttcacctgcattgatgtcgctatctgggggttaatgccaaacctgacccgcgataagcaggaacgtagccagttaattgcactaagcagggccttttccaatgtggcaggcatgctgtttgcacctatggtcattccgctggtcatcgtttttggcagcggcgatgaacatcagggctatctatggctgggcgtggtagttggtgcgctaagcatcattttctgctggctcatttttttcaacacacgtgaaatcagtgcgcctgcggcagtgaaaccggtggcaataaaggagacgctgaggacggtagtaaagaatcgctcgataatctgtgtggtgcttgccatgacaacattcggtatgagtgttggcctgcaaaatgcaaccggcatttattatttgaaatattacctgcaccttcctgactttgtgccgctttatatactgctgagctacaccttcaaagttctgggcgcgctcgttgcgccagtcattcttcggaaatatcacaacgcaaaagcagcatttgttacgtttgcactgatggggatctgcagtacgttgctgaccttttctcccgtgcatctgccggtggtgtatttcgttctggctgcctgttttagcctggggatcggtgtccttctggtttcgattaccggcatgatggcagaagcctcagatatgctggaaatatattccggtcagcgcaatgacggcatgctgttttcgctgaatgcactttcaatgcaaacaggctttgccttatccgctgcattagcgggcttcgtactccagtggagtggatatcagccaaacgttcctaatcaggggcctgatgccttactcgccatcaacttggtgcgttgtatcgctcccgccgttttctgcttcgctgtgctgctcgcatttcgtctgtggccagcggtgccatccatccgagcaccacactctttcattcgcccacagtcgctgcacaaaaatggagccagccatgactgaaattacccgaataacctgtttcgacactaacgcactgctgggcgttgcaagagaaaacatattgctgagctgggaaatctccgcgcaacgtcgcgacgtgactcaacatcaatatcagctgcagctggcgatcagagctgatttcagcagtatttgttatgacagtggatggataggatctgcgcagtcggttaacgtggcgctgcctgcctttattccctcgtcatgccagcgatactggtatcgcgtccgaatcattgatgaccggcaagagcagacagactggagcccatcggggtggtttgaaactgcgttgctgacttcacgtgaatggaaagcgaactgggtgaccccgagtctgaggatgagcctgcagagtcagtgtcttatctgcaccgtatgtttgatattgaaaagccactcgtctcagcccgggtgtacgcaactgcgcttggtatctaccagctcacagtcaataagcatgctctcgaaacagacttgttcagcccaggctggaccagctacgacgaccacttacagtttcaggtatgggacctcactccccatctgaaacagggtgaaaatgcgctgattgtcgcgctggctgagggctggtttaaaggcgaactgagctggctaaaaaaacgtgagctttatggcaataaaaaggcatttttgggacagatacatctgagatttgccgatggtgaggagcgtgttgtctttaccgatagtcagtggcgatgcggcacaggaccggtcgtaaaaagcgggttttattccggggaagtgtttgatgcccgccgaccagacccggctcagcatctttgcgacgaaatgaaaaacgggccgccggcaaaagaactgaagatgcaatatcgactggttccgcagatatcggaacctgtacgcataactgaatcactcaagcccgtttcggtcttacacgatcctgatggagtgcgtatcctcgacctggggcaaaatatggtcgggcgactgcgtgttcaaacctgcctcgatgacgggcagatgctgacattacgtcatggagaagtactggacaaggcgggtaaattatatacggataatctgcgtaatgcgttacagacggtgcagattacgggtaacggacagaacatcgactatgcccctgtgttcagttttcagggattccgatacgtcagtgttgaaggtcttgatgcgctgacggacgagcagttgatctcctgtattacgggagaagtgttacacactgacatgatgcgcagcggtgatttcaactgcgataatccacttatcaatcagttgtatcaaaatattctctggggcagcgcgggaattttgtggacgttcccaccgattgccctcaacgtgatgaaaggctgggctggacgggagatgcacacatattcatccgcacgggtgccactaactacaacgtccgtcgcttcttccgtaaatggctgatgagcgtaagtgccgatcaaaaagcgaatggaacgatcccaatggtcgtgccggatattctgcgcgaatacatctctaaaatctggggagatgaaacttatacctcttcgggctggggtgatgctgcggttatctgtccctggacgctctggcaaatgtatggcgacaggcaactgctcgccgaacaatatccgggtatgaaagcatgggtgcagtatattcatcagaccggagccgatccgtggctttggaacagtggttttcagtttggagactggctggctctggatgcagaacccgacagttattttggggcaacgcctgtctttcttgtcgctaccgccttctatgcatggtctgtctctctgctgagccgcgcagcagaggcgttaggttttgctgaagacgccgcactctatggtgagtgggcggaaaaggtatcagaacgtttccgtcaggtatttatgctgaatggcgacatgatggcagatacccagactgctcatatccttccgcttgctttcggactccttccggaggaacaacgtcagtcggtagctgacaggctgcatcagcttgttagagagaacgattaccatctcaccaccgggtttctgggtacgccttggctctgtactgtactctctgcccatggtcatcatgagacggccgtgaagctggcctgccagcgaacattcccttcgtggctattctcagtggatcaaggagcgaccacaatctgggagcactgggacggtatcaaacccgacggaagcttctggagcgcgaacatgaactcatataatcattacgcctatggcgcgataggtgaatggctttttcgctatatcgccgggcttgattacagtgagacaagtgtcgcctgggacgatatcgtttttcgtccggatttatccggcgcaggttttcgacaggcttccgcacattacaattcggtccgtggcagggttgccattgactggagacttaataatggttctgctgaaataaaagtcaaagtaccggcaaacgcaaaagcaatcataatactaccagaaggtgaaaacgtgatcttcgaaaaaaacaatcataactcctggaaagacatacatgacaatcatgtcagatatatccggttagggtcaggtaattatcacttcatgattgaagatgaattatttggttctaataactcggcagatttgatttctgaattttaaaaaaatggggcattttgccccatttatttttagtgtaggggtctgaggtccaatggagcagaaacgtacgtcatgaacgtaattatatgattttaattctagaaagaagtgatcggttcagtcaggtttacgttgagtttataaacatgggaagtgccgaaaaacgcatggtcactggaatcaccggaaagagtaaagaaaaacttgttttctttgctcacccactgtgctcaaaaaaacagacttagcgtacactttcgtacaattgggcttcagaccccgtaaccaacgaggcggcgtgcggcgatccgcgccctcgcccacatcaaaaaaccgcccttgaggcggtttttttttgcgttgcagacagagggaggaggaaacccactccgcctcgttacggtttgaacgttccccgatgtgaagggttgtcatgctcatcatcgacatagtgtgtctgttcccgctgacgttgttcgtaacgggcttctgcggtcgcgacgtaggcggcattgtcggcctggtgagccctaagcgttctatcgtcctgacggatacgctcaagctgatcgtcattggtcgggaccaccatgctgtcagtgtgtacctggttatggcgggcagcagcaccaatcgccgaggcaacaaaatacccgccgccgtcaaactcaaccttctcgccagatttccacgacaccatatcgatggcaacgacagtattgatcccaccatagtcatgcgggtgacgcacctcaacggtatcgcctcggtcaatgatcgcctcacgacctttttgagagtaaaccgctgagccatcgcggtgaacgcgcacgctaaatccgtcggctttcaggaccggcgtatcgtctgccggcgcacaatagatgatgttatcgctctcaaacggcacacggtttttacgcccttcacgatacgcccagccgcgcagctggctcaccgccgcctggcttccttttagcgcttcctgctcggtccagacgcgataggtcatcggccgggccttcccttcttcacgcagctgttcgcgttcggctttcagctggatacgcagccccgccatcgctttttctcgctcaaattccaccacgttatacatcagcttgcgcatgtgcgggtcgcctacgccgtgccgtatccgcaccttctgggctcggaaactatcggcaatctctcgagatcgtgcggctatgcgcaggtcaggtttaacccacgatttgcggtaggcctggtaatcgtctttcagcttttgacgtgcctcggcacgggcaatgcggcggacctggcgtgcaccctggtcacgcatgtgcagctggtcgttgtaggccgcgtgcacgtgtttgtcatgcacatcggcgtcgttaagcggcgacggcgcgaactcgcctactttaggcacaatacgggaaagcgtcatggaagtgtgcaggcgcgaggccttaataggcgtctggccagggttgaacctgtcacgcacaatcatgccttcaccgcgtcgttccagcttgaggccggcacggtcgaacacggcgtgcatgcgctcccacgttgccgatttgtcgcggaacatcgcattgatgtccttccgacagtgcgtcacggcgtaggtgtacaggctttcgcggtcgccgaaatgttccagcgttgccgcaccgcgcggggccttcttgtagccgcgtttggcgcgcacgatctggttgtcggcatcccgaacccagctgccattatcaaccttgaaattaaatttaagttccagctcacggcaaatgcgctgcatcttatcggcatccccgtgaacggaaacggctttgaacgtcaggggatttacgcggttagcgacaacatgaacgtgcacattgtcggtatcgcggtgtatcgaggccatgtactgatgaagctgcatatccatacggcgcagggcatactgcgccgacttgaaaatctgatcgtctgtcggattttcatcttcctgccagctcagaatgaagtgataaaccgggtccttgatgcgggagttttgcatggccacgccgttcatttcggacgctgtgctctctaaggaaagtaagttgtgctggctaatcaccccgtccaccgacacgcgggattcaccgcgtgcgtcaacggaaatgagctgggattctgccagactctcggtgcggttcatgtattcgaccaggcgctcgaacaccttgccgcgtgcgcgggccggacgtttaaaacgggggtcttccttgatttcatctttcagggaaatgtcatcacgcacggaaacgtagccgaccagctgcacaaagctggagcgaccgtcgcggcgtttcggtgggatgatgatgttcattaatcgaatcgctggtcgatgcgtaagatggcttttttcagttcctgcagcacctcagaatactccttgctgccaatccccttgccctgggtgaacaggtgtttttgcaagccgcccagtcgcgacaactccatgatcagcttatggtcggtctgcggaacaatctttctcgacatcgcacagcgcagcataaacgcgcccaggcttaggccggcgtcggtcgccttctggcgaatggcgtcgcgttcttcaggcaggcatcgaatgctgggaagaagtgcggtgcggtttctgctttcgcttttgctcatcttttatgacgcctgctcgtccgattcgattagggatttaccaattctggggtgtcggggctttgccctgaccaggcctctttgtgggaccgtctgcgtgcaggcggtgctacaaagtatatcctgtcccgtactttacttccgtgaactggagtataccgcgttcacctggatttgtcatggtgtcgaagagaatgagaggcaagggatgacagggattttgtagcgggtataattttagaaatttctcaagaagagcacccgaaaccatggcgaatacaaaatttttcacgcaggaccagattgataacgcgaaattgtcgctggctgatctccccgatttaaccccgaacagaattacccgtgaagcaatgctaacttcgttgagcgatgatattgtcacgctgtcgactcataaagggtacagcgccgccgatattaagaaagcactggagggtttagatattcaggttagcgaaaaagcgattgcggaaattttgaaaaagagtacgggcaaaacgacgcgtagccggaaaccttcgcgttcatcggcgaacggcaatgcagccacgcaaccatcgcaagaaacgcgggcgatttgataacgtagtaactgaatagcaaagatacaaggcaggccggccattcattactttttgtatggctcgaagctatacggaaagtaacgcgtgcatcgaagcaaaaaaggtggctcattgggccacctttgaagatagaaattaggatttaagttctttcattttttcagccagtgaccacaaggcgcggtttgttttgatgtcgccgtctatgccgttgatcccacgcgttctgacacgcttcccttttgcattgatgccatacacgcctcccttaatcagattttcctgcgtgcgctgatagaccatccagatatcattgctgtcgtcttcgcggcggcggctctgtagcaccttctccggcgtcagtgggttgtgctgattttcataacggtattcaagcgcggtttctgcaaagatgcgttgctcgtcgcggtttagctggatggctttcatttcctcgcgagactctgtaactgcatcgaaacggttaagaacttcataagctccttcgatgacttgacctacaatgtcacctttatgagggactcttatttctccgaatgtgtcaccgcacaccataccgttatgacaaacaaagcggaaaacgccggggatcatttgatagctgcttgaaccatcatgactgttaagcagtattatttctggcacttcctgacctgaaatttctccgatacggcgaagcctaagcatatgcttggcatgaccaatgcgaccttcatcacgcacacgcgtttgacaggcaaagaaaggctcgaaaccttctgaacgaagtttatccagaatggtgatcgtcggaatataggtatagcgttcgctgcgtgaaccatgcttatcgtctgaaaaaatgctcggtatatgacgatagatttcatcattagtcagtgggcgttcttgacggatcatgttcacagtacggaaagcagaaactaaacgagtcataattaaaacctcagtgtatttaataaaaaggctgactgtacagccgtgctgaaattaccagtcaaacgactgaatgttatttattacgtgttcgtcacggtcaaagagtacgaacgatattcctgtatcttttgtgatagcttctaggaagcgacagagcgcagttgaaccgccataatcacgcaatatttctaggcgcttttcacgctgtgaaagttgaagaatgaagccatattctgtctcaaacacccatgattcatcgatccacttaaaatcatcattgcggtcacgatacggacggcaaagtttctctaacagctcacaatcactttgggtcatgtgtgccgtgcttatagtgatgcacttggttagtgggacggcttgcttgactagttcttgtaaaatatcttctgacgccattttctttccttgtgctcttgtgagggcgtgttccgccgatggcctgggaaacctcgccgaccgtggccaatgacaaggggaaaggcaaagccgcagcttgaaggaagcatgactgaaagaccgggtgcagactttcagccttaggcggcccttgtcaggggacacaggcgtggtatcccttaaaggcccggcggaatttgcccgacaagttaacggcaatggtaagggaatggcgtcagtaagaggcaaacgaagtgcgcagcccaacgggcggagataaaaagaagctcggagggcgcaagcccgaaggcgtccttgatggcgcccgtaaggggcgagacgccgcgcggatcgatgcgaagcacgcacaaatagcccgaagggaggcgtttggtcgttgacattaagcccttacttttggttatgtggaacttttttcggggagcaagacataatatcaagacataaaaaaagcgcagaatctgcgcttttttttatccgcgtatttcattcaataattcggggtgatgatccaagacacgaagcaattttatcgtggaggggtgcggctgagctacacccttttcataccgcgagaaggcattcacaccgcccccaaatatctcacttgcttctttctgggtcagcgccaattttttccgtacgctcacaataaactcaggctcaacggtcactgcgatgatttgcgctttgaacgccttcagttttgcctgataagcgttagcctgatcgcggtccatattcacctcaccgcaggcggggcaatgttcaccctcggcgtcgatctgggtcttgtgaccacggaaggaataaggcacttttttagtcccgaacgccagttctgcaccgccacacactgaacatttcatgttatttctccttgaatgatacgatcaaaacgccgttgctgacggtaagctttaagtaaacaaccccacacgccagcgtaggtctgtaaacatcctgccacacggtatgatcgttgtaagtcgtcatacttttaaaaaaatcactcattttcaatcctttgattgcatcacacatgccgtcgaaggtcagtcccaattcatcagcgccgttcatggccgtattggtagccctaaccttgccctcagcaactaaggcttgaacaagatgcaggcgcgtatggggcgttttcttttccatgttcgctcgttaatgcgtttccaatagagataattataacctaaaaggttagttttagtcaccttaaaatcaacctaaaaggttagtttttatcggcgtaaaacgcccatttgggcgcggtattttttagtctatagcgcgaaatatcagacctgattcaggatgttgatcggcataatctttgagcctgtcctgctgggcaaccagatgattgttcattagcgctaagccatggtgataggcgtcccatgacaggcgattcaataccaacagggttaatacgatccctgcggcatccgctgacatctctccctcaaatccgttcccatcaatgcgcagggtgcaacggtctaggtgtggcgggactagatagccgccccgtcgggaagctctttgaatatccataccccttccgcatattcacggcatacggatctggccgtggaaaaaataaaggattcagccttgcggtaattcgcaccgaacaggcgcggcaaaaaggcgagacggcggttacccgaaacaatgcgggctgtgtttgaggaggtgcttttatctgtatgcatgaggatgactccgacgccgttcggggcgctgccgctactcgggacattacggccctttcgataggatcatgatgcgacaagcaggaatttttcatgccataccgcaccactcatttttaatggcttctaagcatgtttcccatgcataagaggtttattgtagatgacctgatagtcacggctttggccttgcgcctgcacgaaatcgagtcgggtcacgttattggctatgccgttgaggatcatcactaactcgatattttcaaacagagataacgcaggatttactggccattgcagattgcagttttccccttgcagcaatgggatactgcaaaaatgaaaacacgggttttcctgtacgtgactgacaataacagtcacgcactctcgcggctctgatacgttgctaacaatagaagggtagagaattgccgtcatattcacgctcactaatagggtctagctgatagaccaacaaagtgggctggcgtcgccagcccgcgggaactacttaccttctttgaggaaccggctcaactgcgcggccagctcataggtagacgggaacagggggttagccagacgctggtttggcagctgattcagggcctcaaggcaggcttttaaaaagatgtctttttgagcggtaatttcagctttgtgctgtgatggggtttttgcgtatgacatagttaatccttaatgcgacgccgaacggggcgctaccgctactcaggccaagtgccctttcgatgtaattattatacgacattacacataccttttgcaatttaatatacggaatataaagagattttttaaagcaccacttcatatcccatcgatgaactaaccgacatcaagcggttgcatcgcacagagcaaaccatttatgacgctggtttaaatagaactcgaccgccgccgcgatgtttcactatttcgcggcctctgccgtgtattggttgtagcctgcggcctcccatttctcgatcacatgccccgaatgggtgacgtatccagcgactaacagctcattctccgccttagcaagtcgtgcattaagtcggggactaatcattggcaatctccatttcccacactggggaagcgatggcacgttttatcgttgacgcctctggatgctgggccacgtaggccagtaaccggttaagttgtttatcaagatgggcagcatcacgatccgcgccgtccgttcgcgcgacacttccgacatgatgaagcgttaacagggtcatgataatccctgcggttttggccgagagcgtgtcgcagaaatggttttcatcaaccttcaccgtatagtgtgttaggcggcacggaaaccaataggctccgccgttagacagcacatctaccgaccaaccatcggaattgtcactatcaatacaatcgccatagggatcacgatttgcgtattctttcaggcgatacatgcatttttcagaaatgacagcgccacattcattggcgaacatgccgaaaaaatcccaacgaaaatagatgaattcgtcaataggaagcgaatggacggtgatcgatgaggggatgactgcacgctcataatacatactccgacgccgttcggggcgctgccgctactcaggcctcattgccttttcgaggcaatcattatacgacattacacaacccactcatagcctatagcaccacattaactcaaaaataaaggcgacctacgccgcctttatttcatgatttacttgtcttttatgacttttaccagccccgcaatggcggtaatgagtgcggcaagggaggtcaggatttgagggaggttgtgaaggatgtcagcggaggtcatagggcacctgtaagtgagggggttactgtcggcgttgccgtgtcagtggggttattatacgacattacacataccttcacaataaccgttcgtcggcttgaacccaccctaatgcccgatgccatgcgcaccctcgacggcgacgattgcaacgagaacaaagccggaaactaaaaacgccccagaggggcgctgtaaggctgtgtagcatgtcacaccccattatccttactcttcgtctaattcagcctcaaaatgccctgtggcgatttctaggagcctttgcaattccccaccgtctaactcaaaaacatgaaataaatgcatcatgttcgccagtaggtcagtcacaatgtctctcagtggctcgccggtatcgctcgcaaaccgcgtcagtgcctgcgctgccaaggccgcgcgcgctcggttggtcgtggaggcacaatgcacgcccaatgcgggcagttcatttgccaacgcggccagctcgctatagcgcctatcattggagcggttgtcctgcgcatttaaattttcttctgacgccttaatcatgctttgctctccggtttttcctgtgttaatcgatttacgcaacgcaaggccagcaggcccataaactcacattccgcaaggctgtcggcgtcatgcaacaacgacgattcggcaaagtcaggcgacacctgcaagcgtgcataaagggaataagcagcaacgctatgcggagcctcggcggcgtcctcaaaagtgatggattccatgaattcaccgaaatcttcgactggggcgatttcgatgccaatacattgcacgttctctgcgtgaaattggcccttgggttgcccattccatgaaaagtccttttgtcctgccagctcatcgaatagggcatccagatatgggtgatcggccaccgcttcggtcaacgcattgaaataggccgcatggtgagcgctgtggtgagataacgccgccagtgtcagcgcctgcggttttgactttacccatgtttctttagattcaagagccgcgcccttaacgttttgtgtgtgcatgttgtgcttctccttgagttaaatgccctgtttctttgagttctttcgccgcttgagcgggaaagggcgtgcctggtaaaaggggcatggcaaggaggagagcgcagcggtccttgccaggacacgccaggcgcgcaatatcccgcgccggtgacagtacggagaaacagggaaacactagggggagaacgggcacacacccgcccaggcaaagcctgggcgtccttagaggccggtttaccggccagtgaaagcgatggcgtcagccagctgcaaggggttgaaagttagccatcggacactagccggcaggccggaaacccgcagggttccgcgtagcttaccggctggccggttagcggagtggggcagacgaccggccggaacggtcgggagccgaagggggccaaaaaaaacaactcacctacccgaaggatgcaacaactagcccgtttgttcattaaggtatttttctttagcggccgccacggctttcttagatgcttcctgctcagtttcaccatattgcaacgaccaataatacccatctttcgaacgcacgcgcctgccacgaccggcttcataaatctctacaaattcaacctttgcctcatatttcagccgccccataggtggaataatttctttaataacgaccttatattcaattatcaagctcattagaacacctaactttgtagtttgttaatcagcctttctgacatccatcaaaaaaccccatgacggggatgatttcctgatttacacggcccgtcagcacgagaaaacgccgccagaggccatatggcaccggccgctctccatttttaaaggtcctgatccggcgatctccgctggtctgcagccccaataattcggccaattttcggtctgaattgtacgcctcaaacgttgctttgaactcttcaaataaggcgcagacgagctctggggcgggcgcttcccagccttcagcttcggtacgcagatggcgatcgctgtaagctttggtatcctcctcagccagggcggggaaatgaggcgcgctgaggtttttgcgcaacgcttcgcagcttttttccacatttttagaaaaaatgatccggcgttgctcggccagagaaggtaaatcaatgttcatagaaaacctcgcaaaaaagccccgccggttaaggcgggcggagttaaaggttatgaatacccgtgagcgcgttcaaacgctctaaggagttggtccagttcatcccacgtcatcgcggggatttttaccggtttgccttttttgaagcgctttaccacgtgcttagcgaatgcaataatatcttcttgcgtcatagacctatctccataagtttatttggcgctacctcacagaacgctccaacgttctgtgcggcgttagggaggggggcgagccccctctccttagcgcgttttcagtccgatcgacttaacgtctgaaattcggatgttgaccaatgcaagactcccgcctgccagtgcctcccaccgtccctgcgaatgcaggtattcaagacagtaaaaaagatacgaactcaacagaatgtccgttctctctaccctgatcccgatgtgctcggggttgaattggtaggtcggttgaccgcaggtttttaaagagcctcgacaaactaaccagaaatctgcctcgggaaaattcgtcttgatggtagccacatcattgagtttcaatcgctgtcctcatcggtggcttagccatcccaagaacgagcggctttctgtgccaccgcaggaacaacattaggcgaaattcgcctaattgtcgagaattaattaggcgaatttcgcctaattttagcgtcatggtaaaaaataattaatttaaaaacaattggttaattatttatctgcgtgattgtttgtagatgctgtttaacactagccatgcccttattttgaagcggaccaggccattacccctcccatgacgccgcttttatcggcctttggaacatgggggcaagcaggcttataagaggcttatgtttggattagcacagcgagaaaaagagggggacggtgaaggagggcctgctcatgcaggcctacatcttccttaatatgataggtttatttttcaatgagttttagcttgggatggacgccagccaggagcatcaaaaaattaaattctcccggtttaagcgtaccttcattcagggccgattccttcgatttccatgaagccagtttatatcccaacattgccgcgatatctttttgcgtcatgccggtttcgatacgcagctgccgaacctcttctgcgtcatagggcgcggtgatgaccacgtcatccgggtgatactcttggagctgataatacggatgttcattggccaacaggagcaaaaaattcgcttcccctactttcatcggcgctgtgttactggccagctgacttttgacagactctttacgttgccattggcgcaaagaaacaccgaaaagctcggctaattcagtctgactcaggcccatcttctcacgcagtctcgcaacctgggcaccgtctggaagctcctgcacaaccttaaacatttccttcactccagaagtccgaatccaggaagattgatacctgtcgaattcggggtacgcctgttcgcgcagtccttctttggtggccgaaaggaattcattctgctcggctactctattggcattaaggttccatcgagagacaacagcccggtaagagccgtcctcctcctggtaaacctcaaatacaaacttgtttttgcttcgtatcccttcgttgtaataaacacgtatggatgtattactcaagctgctgtcctctctgagaagggccgacgagtgccataacgcagatcacgtcgtccagggataaatcatattcgctcatacagctctctttaaccgtgccggttataccgttggcgtagcgaacgtcataaagtttgttggaatggcacctgaactgctgatactgcaaaatttttgcaggcagttagccagccactggtggcgttcctgagtagccgttttctgcgcgagattcaagcgggctatgtcgagatgggccataataacgggtagcagccggcgatgaatatcggcagcaatcgcgggggcttgccgatgcagggcggcgtgcatctgaactgcggtaaagtaggaatagtagctgcgatcaataccacagctaaagttatagtcatgctcgagccgaacaatgccgatgtaagcgtgttttgaggtgcgattacacagcttggcgtaatagggatgtgattggatctgacagtaaaaccaaccatctcccagtgcctgggcaatggctatgaataccgccgtgtcatgcgaggtcagttctctattatggggcattgtctttctccgacgccgttcggggcgctaccgttttcattttaaatctaagacatcaaacaaatctgtctaaacactttctcagctattactccgcagagcgggatataacatacttttttccaatctaaccttttgagcttgttgtcattgcgcgatatcgccagcaagcctcgccaaacctctagagtagagatatgtggaataattttatgtcgacgttacgcgcttcgttcggctagaaatatctagaattacttctttatgcttagttttgttgccaaccaacttgtaccaagcagcaagctttctaagatctggcaacgcgactttttcttcaacatcatatgccgttagattgcttcggaaatcctcaaaaatctctatacactttcgcgcccactccccttccagatgagaacctacggccgctttaggacgtctaggtaacctgggcctcagaggctttactgcttcgggtaacttttcatccacatagatgaatttaatagccacgacagttcttccattcttgatcggctcccaaataacagagatgtcagtattcaagtttatgcggtcgatggcaggttcaagtaacttctgtctgaaatcacgataatcttcatacttacctgcaagtcccgttttttctcgcatccaacctaggtcaaagaccacttcaataggtacagatgacttacggcctttcagatttcgaggtttaactaaccagctgtagaggcgcatggaaaaagtgctgtctagcttggctaagttggcaaacgcaagttgagtaaaagattcccttagctcatagaggtaaggcgccacatcttgaccaaatctcagaacgactgcactatgatcgtcgttgtgcacatattctagccgtgaaaaccaggacatttggactttccggaccttacccgactgcttgtctggtttataaatagtgacgggttttttcatcaaactatcagcagcatcgcgcagttggcggtggctactcgttgggttgaccccatagattcgttgaaagtcttgcgggtaaagagtgtaaagggtatcaggctggggtttgcgactgtcgatttgtgctaatgcgagattcagtaatcgcatctcatcgagagtgacactgtatgcaccttcaagtaagtcattactttgaacaaccgtaagtttacttgtttccattgcccaaattcctatgtggattttttattgattattccacataaaaatgagagccgtaaagaaaaaaaatgactaaattagaatcaataaatcagtactctgcgtgaattaaagaaactttcaggcatgaaatctctccacatatagtttttatggcaagaaaccaagtcttcttattagccactagatccagcatcaaattcaaaaaactgtctaatgttgatttttcgaaggcatctaagcgtcgcatagcatgatttatctacgttatgatgttagtcactacataaaatctctctacatatagtatctgacacacataaaatctctccacataaacctcctatgtcttaccggaaatctttccacattacctgatcgagcagcagaaaattattccactttactgatggcctttgacaggaaaaatctccacatatgggtatgttaagaaagcaggaaatatctccacgtatacggtgccactcaggaatttggggtgaggtatgaatgaaaacacgagcaggaaaacactccacatatgtggttttaaagggttatatttagaaattagagaatattaatttaaataaataattcaatcagttaaagtaaaatccttacataaaatcattccacatttactttataaagatcaagttaacctgcctcatttactctaaaacacctcaatcagttgaatatttttggtgttgtgacatcgtcacttagtgtgtgcataatctaaaaaattatttatataaccatgatttatatgaaaaaaccatttaaatgcactgtttgagttttatttttaatggcaggaattacatgctgctggcaagttgataaactcatcattgcagctaagatgtttaataagttaccaacagaaaaaaactccacataactaatagattgatctacttgaacttatccacagaaatttactccacctttaacatgaaaaagctccacatataacctaaaagaactccacataaagcatgaaatcactccacgcaatgctttccaactatctgaaaagtaagagataaaaccgctataaactaaaagatttaaaattaaaaaagaaacaaaagcattatgaatcattggatcctaataacagatcgaaactagaacgtccatgtaattacttttaacatcaatgatttaattcttatcaaaaagaaggctttgatgatttatctgatcaagctactttggttcgcaaatttaaggatcaaaattcagggatccaatagaccatgcttttaatcgtcctgtaaggcccaccaagcgatttaaattcaaaatacatggctacggttgattgtattgaaaaaatccataaaggccgttccagctcgtttttagttatcaatcatgttcaatctttgatctctaggcaaaaagtgattcgttaatttcagttaaaaccatcaggtcaagtcattgctaataggatccaacaattctactcaaccggtgtgaaccatccattttataccagatagcaactaaactaatccacgatcaccctaatgccccatcaagtttatggcgaatacaccggcaaaaacccaccaatatggacatattgctcacaatttatacagataaaatgcggaattagaataaatgtgtttaccttgatgtttttatgcagcattattgtttaaaatcaaaaatgctgcatgtacgaggtattaaatgcttactgatagcagacaaataaccaaagtagctcaacgttctgagaaaatgcttctttcacttactgaacaaatacaagcgcagaaagaagaactttcggagacttctttttatcaaacctatgccaaggcagcattgtccaagcttccaaaacttacgcgtgcaaacgttgattatgcggtgagtgaaatggaagcttcaggttatgagtttgataaaaaggctgcgggatcagcgattaagtacgcaatgtctttgcaaaatatcattgatatttatcatcatcgcggtgtgccaaagtatcgtgatagacataagcaagcatttactattttcctcggtaatctgaaaggcggcgtatccaaaactgtgagttcagtgtcattggcacatggcctacgcgcccaccctcaccttttgctcgaagatttgagagtcttggtcattgatctggatcctcagtcatcggcgactatgtttctaaatcacactcgttccgtaggtaccgtagacgcgactgctgcccaggcgatgctgcaaaatgtcagccgcaaagagctgcttgaagaatttattgttccttcagtggtaccgggagttgatgtgttacccgcctctatcgaagatgcctttatcgcatcccgttgggatgtgctatgtgcggaacatctgcctcaacaaaatccttatgccgtgttaagagaaaatatcatcgataaacttactgatgattatgactttatattcatagacagtggccctcacttagatgccttcctgacgaatgctattgcatcagctgacttgctaatgacgccggttccgccggcacaagtagacttccactctacattgaagtatttgactcgccttccagaacttattggaatgattgaggattcgggtatgaaaaccaggctattaggtaatattggatttatgtccaagttgcagaataaaactgaccacaaactttgccatagcctcgcgaaagagatctttggtggagacatgcttgatattgccctgccccgcctggatggctttgaacgatgcggcgagtcctttgatactgttatctcggccaatcctgctacctatatcggcagcagtgaagcattaaaaaatgcgcgtattgctgctgaggacttcgcgaaagcagtctttgatcgtattgaattcattagagtgaactgaggtagatgatgaacgcaaatagaaaagttataggcaggactttctcccagtcttcattaaatgcttcgtctttagaagatggatactctcaacgattcactcttgcctcaggaagagtggcgcaattccatcttgagcagattaatgcggattctgttgccgaagatacattcgtacagcttgaaaataatggaagagaccaatctgcactgactaatgaatcgttagcggacattattcgtacgatcaaattacagcaattttttccagcgatcggccgtaaagtcgatgggcggattgaaattctggacggttcccgtcgaagggcgagtgcgattatcgctaaggtggggttgctggttttagtcactgcagcagagataagtatcgaagatgcgcgccaattagcgacagatattcaaactgccaaagagcacaatttacgagaagttggcttgcgacttttgatgttacgtgaaaagggtatgagtcagaaggatatcgcagcatcacaaaaattatcagaagctaaagtgacacgtgcaattcaagctgcctcagtgccttccgagatgcttttgcccttccctgttcaatctgaacttacttatccagattataagtttcttttgggtcttaatgagcagctgatagctaacgggataaacacagaggagctcatcgaccaggtggttgagcttaaaagccgcttgaacaacgactatgttgctgaagactacaaaacagccataatcaatttattcaaagaagtatcccctactctgctggaacgtccaactaaagatgcattcatcacccaaaagttgtgggagttctctgacaaagataagtatgcacgtaaaaaaaccaaagggcggctagtcaattatgaattcggtcgtctgccaaaggagctttatgaagagctagacatcactattatggcaacgattaaaaagtatcttagcgaataaagtttcatagaaagcttggcgatttcaagctgaaatcgtcaagctacagactgaaattataggtgaaattttattatattcgccacttctgatttggttataacttgttgtattataagtgtttagttgttacccattactgaatttcagcctgaaatcgccactattcctaaaaggttttttttcatgtggcgaaaattttattatttatctcacatatcaaaagtttttcatcctcctgatccgtgttttttaagttgagtttatcgattatatttggatcttaacgttcatatgaaaacgaaaagcttcgtatgttaggccgtggaagatcaatgcccctaaatttaaaacgccacgcccgtcgatatgttggaaagtatcacgatcccctccccgtcatagaacaacctctagatagtcgttcctaatcttcacgatatgtattgtagtggcatagtgaatttggccacatgaatagaggtgatgacctgctccccgttgattaacacaccgcgatgttagtaatgtcttcataagtcacatgaggacatccccatgaagaaacgtttttccgacgaacagatcattagtattctccgcgaggccgaagccggagtttctgcccgtgagctctgccgtaagcacgccatttccgatgccacgttttacacctggcgcaagaagtttggcggcatggaagtccctgaagtgaagcggctcaagtcgcttgaagaggagaacgcccgcctcaagaagctgctcgctgaagccatgctggataaggaggcgcttcaggtggctcttggccgaaagttctgacgacagaccagaagcgggaagccgtggaagtcatgtgtgaggccgcaggtctgtcgcaacgtcgtgcctgcaggctggcaggtttgtccctgtcgacttgccgttattcggctcagcgtccggctgctgacgcgcagctgtctctacgcatcacagagctggcacttgagcgccgccgctttggttaccggcgcatctggcaactactgcgtcgggagggccttcacgtcaaccacaagcgggtataccgcatctatcatctcaacggcctgagtgtaaagcgcaggcgacgccgcaaggggctggcgactgagcggcttccgcttattcgcccggatgcgccaaacctgacatggtcgatggattttgtcatggatgcacttgccagcggccgcaggattaagtgtctgacctgcgtggatgattttacgaaggagtgtctgacgatcaccacggcattagggattacaggcgttcagggacacgtattctggacagcattgcgctgtttcgtggctatcctgcaacgataagaaccgatcagggcacggaatttacctgccgcgcgctggatcaatgggcctttgaacatggtgttgagttgcgcttaatccagccgggcaagccaacgcagaacggatttattgagagtttcaatggccgctttcgggatgaatgtctgaatgaacactggttcgtcgatattctacatgcccgggaaatcattaatgactggcggcaggattataacgagtgtcgaccacattcatcgctgaattacctgacgccggctgaatttgcagcgggctggcgaaacgggaaatatgaagaaaaaccaactgacattactaactgaaggttgtatctaatcctggggcaggtcagaatagatcgaaacccttgtaggaattaggttcggtttccctttttaactgccaaagaaaacgtccaactaacccttgtttgctggacgttcatttaaacgcacttatcagaaagcgctagtgattatgcgataccgtattttttctcagttacgaatttaggttctttccaatttgggcccttaatgtagtgtaagggactctcaccacccttgattattcctttatcagtcatctttattaccgtagataaaagctctccctctgaaatgacatcaaatcggtaacgtgtataaaagcggtccaagttaggataaccaattccattgggtgagcgaacgaaaaatgcgacagcatcctcaacggactctttttgcactaaagatttaaaatcaatcatttatactccctccattcttgctcatcagccgcttttagtgcatcaggggtatatagctgcgttatgtcatctttcaatttataatcttccaaagttgcagtatgggtactattccagattgccgaagcaattgaaggattatttggcacagcaccatccgagagccccagagtccggtaacgctctagttctcttatctcatgggtataaaagcgcttgtccgtgtcggttactggtatctctcccgctaagattttctccaggcggtctatcatcacattattaccatctgaagggccgaaacgtctggtatgcaacttaaccttatctaagccagctcggtcaatttttgccgttgtccagtccagatttaaaatgggccctccagctttttccgtatcatatgcgcggccactatattgtcccttagcatttgtctccccataaggattacttaccatgacatagacgggctcgacgccggtccccgtagcatccggctgccaatagataaagtcctgtaatcctccaccttcatatatcggcagggttgtcgtgacgatactgtccgcctgcctgaacgtgttccccgtgtgtacgggtgtgacaggtgctggcgcggtattgcctgtatttggcggagcagcgggcccaaaaggtactgggttaatcagaaccgttctggagggtatccccgcaactgcaggtaccgttatacggtctaatccggtaaccgcatcacggacgccactcagtatttggacctcagcaggcacactgccaccggtcttaaacaactttactgcaaggccccctcctcataaaccagtgacccacgtaccggcaagtttaccgtcttcattcccggtgcaaggttgaccataccggccgtcatcagacccgcttgtaccccaaaaatagccgggacatcacgaccaggcactttatcgggttctgtcgcgttaacggagtgaagatgatgaaatctgcgctacctgttttttcaggctggcagcagataaaattgttctgcagacgacaatccttcgccagcttgatgatgaagctgtcctttacggatcatgtttaccagctcaatacccgcaagtatggtctgtgcccgccggaatgatttgaatcccagcatgggtcgcgttcgtcgtttgatgttccggtgatcctgctccacaaggttgttcaaatatttgttctgcctgatcgtgatgctttcttcatcgggtttgtcggcattgagtgtggccaacgctgccgtattggcgctacttttatcaatggttaccctttctggcccaccgtggtggcgaatagccttacgaaagaagcgcagtgctgcaccggcatcccgcctggcggtcagcaggaaatcgatggtctgccctgcggtatcgacggcccggtacaggtatttccactgccctctgactctgatgtaggtttcgtccattcgccagcgtcgacccaccgggcgtttataccgtcggaacaccttatccaacaggggcaccaggcggatgacccaacggtgaagcgtcgaatgatcaacaataatgccgcgctcggccatcatctcttccagattacggaggctcagggaatacgccagataccagcgaacacactgggcgataacatcgggggataatgcaggcgttggaaagattttcggatcagggacatggtcaggcaacatcgtaaaaaaaacagcatgttacctgacgacgtcttaatgcgacagaaccagttcgttcgacaaacattcgtgaaatgggctgcgaagacgataaattcctcatactgggcaaaactgtattatcagagcctcagagaaaaaggaaaatctcatcaatccgcgatccgggctctggcattcaaatggataaggatcatttaccactgctggaagaccaaaacctgttacgacgaagcgaaatatttgctggcactagaagcgcgaaaatcgccattgttgatgccgtaaaaagcttgtcgaatgtctcagggcgtgaagcggacattccactatgccttccatgagcagttttaagggcataatgaatgatttgccctcaatactttacatttttaaaaaatcagcttccctatcgatgcgccgccatcgacaaacaacgtttgcccggtcatgaaggccgcatcatcagacatgagaaaggcaatagtggctgctatctcatccggctggccaaaccttttcatcggtacgctcgaaagataacgttcttcgcccacgcttcctggcggattatttgccctgaacagcgcagtttcagtaggtcccggcgcgacggcattcacggtaattcctgtctgggcaagttccagtgcccagttacgggtgaaactaatcatggccgcctttgctgcggcatacgcggttcgctcgatgctaccgagtacggtaagactggaaatattgacgatccgccccagcctcgcgctttcattccagtcagaatagactgagttccctgtattgccggaaaaagattgacccgcatgacatcttcaaatgaggtcacatcgacctcgccgaggcgctgcggcttaaccagcccgacgttgtttacaatcccgtcaaaggaaaatcgctgacttaactgctcaaaggtctggtgtgtttgcttggcgtcagcgagatctgcactgattaaggtaccgggaaaaccgtcattcgcgcttcgcgccagaccgactacctgatgacccgccgcggcaagccgatgtgccagcgccagcccgatacctttactggcaccggtaattaaaaacgtttttttcatcatttactccgattattgatctccggaacgacgcaccggagagttaggaaatttatagactacgcacacgccgaagagaaggcagcatgtcttcaggctctggacggcgggtgtaatcgggattgacttcggcataaatgatcgtgccttgctgatcgatgacataacgggctggcataggcagcgtccagctttcatctccattgaacaaagggagatcgttctttaatgtttgatacaaatcgaccagataatcaggcaaaacgaaacgcaggccaaaggcggccgccacgctgttatgtgtgtcagacaaaatcggaaaaccgagattattttggcgcacggatttacgactgttgggtgctgtttgcggggatacggcgatcaaatttgcacccaatgcctgaaacgcagggagcatctcttcaagtgcctgcaactccatattgcaataggggcaccagacaccccggtagaaactcaataccagtgggccttgtaatagcagttcggcagaggagacgggatgtccctgagagtcattaagcgtgaacagcggggccttgtctcccgctttcaaggcgcgagcagcggcacctgattcaatcagttcgttagtggcacggtgcattatttcaatcaccgccggaagaacgttatagggcggttttcctgcttcaaagtcgatcttaaaggcgtcaagcctggcttggagtgtcattttggtatcctgaatataaaaacggttaaccctaatttgctcacgttgagaaactcaacggcttaacgtggagcgagtgcgtcgacacgttcaatggcgcgttgtacggctgggcgagccgccatttcatcaaaccagcgtgcgacattgggcgccttttccaggcttacccctgcaaactcccggcgccacagccagccgaagtgggcgatatcggcaatggaaaatgcctctccggcgacaaactcgtgattggcaagaatgttatccagcatttttaccgtacgggcggcttctgatgaaaaacgctggatagccagaggctgcgactcggaagcctgacgttgaaagaagccggcctggccgaaagcaggacctaatcctgaagcatgaaaaaacagctgctcaaacacgcgggctcttgcctcgcctttaaccggtaaaagtcttccgtttttttcggccagatagacaagaatggcggcggattccgagagcacaaatttctctgtgctggcatcggtatcgaccagaacgggaactttgccgttgggattcagggcaatgaattccgctgatttctgctctcctttacgcacattgacagcgtgcaaaacataatcaagaccgagttcttccagcgcaatagggactttaatgctgttgggtgtagcaaatgcgtagacatctatcatggtcatttccttgtagtaacaagcgtcgggccattcccgaattgatacgaaagatagtggctggcatgccgaaggaatggtagatatcctgtagagataacaactattcttcaggggaatgagatggatcgctttcaggctatggccacgtttatcagagtggtagatacaggatccttttcggctgcggccagacagctcaacatcggtcaacctgccgtgtcgaaaatcgtggctcagctcgaagcccgcctgcaaaccagtttgttgacccgttcaactcacggcctgacgccgaccgaggcaggccaacgattttacgaaagggcacgggccgccctgcaggaagccgaagaggctgatcttgcggccagaggcgcaggaaaagggctttccggaaaattgcgtatttcagccgcaacaacctttgcccggttgcatgtcatacctcggcttccacgctttcttgagcaacatcccgaactggatgtggatgtcattcttgacgatcgggtgattgacctgattgccgaaggtattgacgtttcgctgaggatgggaaatttgtctgactctactgccgtggcccgtaagttggcgaccagcccccgctccgttatcgccacgccgggctatctcgccaaaaaaggggagccccgaaccccggccgagctggcagaacatgaagctatcctttataaccccaacccagcctctggtcattcacccgtgagggagcggttatttccatagcggtaagcggccgcattcgtgtcagtgccgccgaagggcaacgtgcagccgtgctcagtcatatgggattgtgcattgcttccgactggatgtttgccgaggagctggaaagcggagcggtcagaaaagtgctgacggcgtggcaactgccacctatcgatctatgggccgtgtttcctaatggtcgcctggctagcgccaaggcacggcagttcgcagggtttgttgaaaccgtcatggtggaaagtagtttgagccattccattctggaatagctgttatctaatcacgaggcgatcacatattattgggaatggaatattgttgtttcacggccagccactccggactggtaacaacaaggatcgccaccatgtcaacgtttgaaacttatcgtaatgccttttccaatgcccgcctgactcgcaaagccaatggcgtactcgaagtcagattccacaccgacggtgacaaactggtttttgatggccatacccatgaacagttcgttgccttgtttcacgcaatcggcgaagaccgtgaaaatcgcgcggtgatcctgaccggttcgggcgatgcctttatggacgccatcagtccagaaggattcgatttctttagcccacttggtttcgacaaaatcttgcgtgagggcagaaaggtgctcagcaacattctggatatcgaagttccgatgatcaccgcactaaatggcccggtgctgcttcacagcgaatacgccttgctgaccgatattgtactagctacgccagaaacgattttccaggataaaccacatttcgaattcgggattgttcccggtgatggtgtacacattttgtggccagaggtcatcggctcgatccgtggtcgctacttcctgcttacccgccaggtgcttgatgctcagactgcgaaagactggggcgtggtgaacgaaattgtccccgcagacagcctgctttcccgcgcccatgaaattgccgacggcattgccgcccttccgccgctgacctcgcgttatacccgcattgcgctgactcaacgtctgaaacgcctgttggaagagggtattggttatggtctggcccttgagggaataagcgcagcacaggttgcgcataccctggctcaacaataaacctgtctaaaaacaatttaaaaaattgaactcactgatgacgataaggaggagctccctgtagaaaagggctcctgctcattgcgaggggaatattatgaaagcgttactgtcacccgttatagcaggaaaattacagctgaatcatcgcgtcgtgatggcgcccacgacgcgtatgcgaaccgcgcagggcggcgtcccaggcgaattgatgattgaatactatcgccagcgggcaagtcagggcggactgcttattgccgaagcaacggcagtgtcccctttgccaatgcttatgaagatgcaccgggtatctttactgacgatcaacaggcgggctggcagcggttggtggaggccgtgcatgctcgcggcagtcaaatcgtacttcagctttggcatccgggtcgccagtcgctgcctgaattgtcagcaggtcgccagcccatagcccttcggcactgatcgccagagacacctatggcgtggttaaaaatcagcagggcgcttatgaaggcaagctttttcccgagccacgcgcattggaaaagagtgagataaagggtcttatggaggagttacgtcaggcagcccttcgtgccaaggccgctggatttgatggtgtagagttgcatgcagccaatggctatttacctgaacagtttctattggatggcagcaaccagcgcaccgataattatggtggcagtcttgaaaaccgggcgcgttttttgctggaatctgtagaaatcttgaatgaagtttggggcaaggggcgcgttgcagtacgtatttcgccaagtggtatctatggtgatatgcatgatagtcatcctacggcgactttccgctatctggtcgagcagttaaacccgttagggcttgcctatctgcatattattgaaccccgcatcgtcggtccggaagacagagaggccggccattattccgagccggtcgcaagccgtgatttgcgtgctttttatcagggacccttattgcggcaggaggttttaagccagatgacgcagaaagtatgctgcaaaaaggtgatgctgatttgattgcctttggccgccttttcacctcaaaccctgacctgccggagcgtattcgtcacgcgtttccgctggccacgtacaaccgcgacacgttctttggcggagacgcgcgaggttacagtgattatccggcctatgtatctgacggcgtttaaacggtcggttgaattacatttgttgcgcaagcattaatatcggttctgtcgcattaagacgtcgtcaggtaacatgctgttttttttacgatgttgcctgaccatgtccctgatccgaaaatctttccaacgcctgcattatcccccgatgttatcgcccagtgtgttcgctggtatctggcgtattccctgagcctccgtaatctggaagagatgatggccgagcgcggcattattgttgatcattcgacgcttcaccgttgggtcatccgcctggtgcccctgttggataaggtgttccgacggtataaacgcccggtgggtcgacgctggcgaatggacgaaacctacatcagagtcagagggcagtggaaatacctgtaccgggccgtcgataccgcagggcagaccatcgatttcctgctgaccgccaggcgggatgccggcgcagcactgcgcttctttcgtaaggctattcgccaccacggtgggccagaaagggtaaccattgataaaagtagcgccaatacggcagcgttggccacactcaatgccgacaaacccgatgaagaaagcatcacgatcaggcagaacaaatatttgaacaaccttgtggagcaggatcaccggaacatcaaacgacgaacgcgacccatgctgggattcaaatcattccggcgggcacagaccatacttgcgggtattgagctggtaaacatgatccgtaaaggacagcttcatcatcaagctggcgaaggattgtcgtctgcagaacaattttatctgctgccagcctgaaaaaacaggtagcgcagatttcatcatcttcactccgttaacgcgacagaacctaatacagcgcatttcccgaatggccggcataatccgccaggccaagctcatacgaaacggtggccgtgcgcggagaggcaaacagcgggccgataaacagatagcaggctgcgataagcgcgttacccgctatcttccctaccggtctgattatgttacccatttctccacccgcttttgccagcgcgacgaccgagagtaccggcagtccaacagcggtgaccagaaatcctgccgctgccgtccagacgtgactgccggcctgaagcccgataaagggagggaaaatgatgttgcccgcaccgagaaatagcgcaaacgccataaagccagggcgaacgtatccctgacgctaagtttagtcatagagaacctgccagagaagtttgatgtttgtcattttgatacctgcctactgatgaactgcttgtcagaaaaattgttcagccagcagcaggaccgcaatgatgaccatcaggccgccggaaatccggctgacattttgcgccgcgcgcgggcgcgtccggagcacggtgcctgagccgtacccaacgagcaggtagacaactccgcagctgaatacgtgaaccagcccaagcgcggtcatctgcagcggaagcggccagtcggcatggacgtcggtgaactgaggcagcaaggctaaaaacaacagaaatacctttggattcagtccgctgatgcagaaccctttgagcgcccatttcagtggcgatccagcatcctcttcctgacccgccaacggttctggcggttgacggatcattccaacgccaagccagagcaggtaaccagccccggcaaccgtcagcgcggacagcacgcccggaatgcccgctattaccgagccgacgccggcggccactataagcgttgcaataagatggccgctcagcatgccggcaaccgctgggagcacacggcgtccccggatgccggctgaaatagcgtaagcccagtcggcaccgggcgtaatcacgaaaagcacggaaacggcccagaacgcagcgaacatactcagagacatccgacgttaccccttaagaccccatttatgaccgactttttatcgttgcgtgaaacctgcatgtattgaaaacccttaccggactaatatgtttaaacgtgaaggaagaatatcgctttgtatgcgggatgtgctttcatttatagtcttagaacaaatgcaattcgggaggtatttagtaatggacaaggcagactgcaatattcttgcatggcttcagcgggacggccgactttctttaaccgaactggctgaacgggtggggataagcctgtcatcctgccagcggcgggtaaaatctctggaacaggatggcgttattaccggctaccaggcgaatcttgacccggcaagcttcggtctcaacttttcagctattgtcttcgtcacattgcgcgaaggagaccggcaggcggtcagcaacttcgaggctgccgtaaaagatataccgcaagtcattcaggcgcagcgcctgtttggcgatccggactacctgcttcacgttatcacccgtgacctgccggcttttcaggagctgtatgatgaaaaactttctggtatggcaggcgtgcagcggctcacctcaacacttgttatgaaaacggttgtaaaagatcgcgcgttgcctgtctgacgcttgtgcaaggcctccgccattcgatagttttcaaaaagttttggcacgaagaaatgttgtgcttaggctttgtgcaaaagtcgaacttccgcttctggcactcagccgacagttaaacctctttgcacacagtttcacataggataaacgccttcgacgttacctctaactacgcttcattttcagagagtaaaatagtaatgttcacccatgctgcggaacgctcataccagatttatggaaaccgcaactattggtggtcattatggtggtcttgacagaaagggaattcaggtttagcttgtttattagccagttactggcaaaggcgatcccagtcagaggagccaaatttagagaagcccgcttaaggaaacttaagcgggctttttgcttttacttttttctattctcaacagaatcacatttactccatcaaataacgatgttgtcagtatgagctgataaatatcggtttgaatgttgtgtttttgagaagcctgacagctcgcgtttccggcatttgcccaacacgcaagggcgcagaatgcgtgctacttacccttaccggacgagttgtgctggcaaatgattaaccggaaactgataagggaaacgaggaatacaggggagaaaaatctgcccgtgcattgccttgtgggaaggccccggttcgcagcagtgatatgggttgagagttctatcagtttagacctgagctagcagtgttctgagatagaagtctcgcaaatctgacattctgctttgagcgagaagcggacgttatgacggcatacttagatcgagatatctttaacaaagggagtaagcctgcttaatgcagctatacggaaaaacttcgcctttaaaacattccaccaatatttcttttcacttcgtccaagatactggatggcttagccaatcatgttccttccttactgcatatctctaattgagcaatagccttttgcaggtgttccagaaacgccttcactttcacctgtaggtattttctgccggaatagagcgcgtatagcatcaaatcttcgggttcgcggttacagttaattttaacaagggagccgttattgatttctgattcacaggcatggagaggcaaaatggcgaaaccaagtccttttagtgcagcggccttggccattcgcccactgttcaccttatagctggactgcacctggacgttttggttttgtttaaatctccagggcattccctggagtaccgacatactcgtaatgcagggggttttggttagttcatccaccgattgtggtgatgggtgacgtgccaaaagttctggtgcggctaccacacagctcggccaacgcagaatttccctggcaacccagcaagaatcctccagtggcccacgtccaaagcgtaatatcagatcgaatccatccagtaggccctctgttggctccaattgtgtgtcacaactgagctgtattcgtggatgcttgatgcagaagtcagcgagaatatctgccatgaatggaaggtctggtgtaatgatcttcaggtggcctgatagtgaatcaccaaacagggcgacttcttgcagagcatgatccaaagcgtgcgtgagcggcgtaatagattgatacagcattctacctgctgcggttggcattatcctacgtgtcgtacgttccagtagccgcacatgaagttgttgttcaagtaaagcgacatgtctactgacattggatgatggcaactgaagctgctctgacgcgagcttaaaactcagcttttcataaacagcctgaaaactcatcagccactgcaattcacatttctcaatcattaattatcccaaaaaatgagtttaacaaagttataactctatatttatcaataatcaggcggccattacaattttcgttaagtttcgtaacaggaaagtaatgatgaccaagcctaagaaaattgccatcgtaggtgccggcgttgctggaatggcacttggaatactcgcgaccaaacagggccatcaagtcagcctgtttgagcgtggcagcaacgtgtcttacttaggagctggcgtaactttatggcccaatgccatgttcgtcatgcagaagatggggctggacgaaaaaatcaggcacgtaggggtacaccgtgcatgatgcgccagtttgatcggaatggtcaccttcagacacagttcgatattttatcagtgaattcactttgcggttttccgagtgttactgtcttacggcgtgaactgatgcgcttactggccagtaggttagagagtctgggtagggagattaaattcaattgtccaatcactaccgcggacgtcacgaaattgagcctggagtttgatttagtcgtcggagctgacgggcgtatgaattcagtcgtgcgtcagtcattgcatggggagcaagaaacgcctcgttatcatggttttgtgaacgtgataggagtgggaaggcaacgagaggacgcattgcacaacgctattgatgactttcgaggtcaaggtgagcgttttggtatcgtcccggtgaaggatggattgtgctattgggcaggagcgtggaacgctcctgttgacaatgaacgtcctcgggcacattggtacaatgagttgcatcggcgttttcgagactggcctgatcctgtgcgaaatttgttgctgtcatgtgacagtgcatctgttaaaggcattttcgtgcatgacattgatcctcttcccttttggcatcaagacaatgttttaatcatcggggacgcggctcatgcttccttgccgacatctgggcagggagcgtgtcaggcactggaagatgcatggcaccttacttgtttaatgaaggagacagatgatttggaaagtgctctgcaaggcttttaccaacagagacatatcaaaacttcagcagcgcagttggttggaagacaatttgctaaaaaaattttttctgagcagccagagccactgctgcctgcatcaactatttccgcagcagaactcagtcggttctggatgcagggtttaaagcatgtagccttctgaaaccaggttataaggatgcggtatgactgtatgtcagacgaatactgaccggtgcgatgtattgttaaacactgatctaataatgtccacttttggcatttaacgtccagtcattagagaattcatatatgtcatgagcgaaaagcggacctttggctgatacagttttgttatgtccatacggcttaggacttcgccagataatgggatagaaaattctctacctctcgtttaccaatgcctagcgtaaagctgacccctgcattttttaaaattctgaggccttctccacggtttctaggatgcgggtcttccatggctacatagacatggagtggtttcagttcagcaagtgtcaaggcacaagaggggttcttccttgataggagcagggttcaagtgtgacaaagatttcacattcaccaattggaaccgttagttttgaaatggcgtctatctctgcgtgatgatggcctggaagttgagtaaagccttcggaaaccaccgccctattatggacaatcacgcaccctacaggtggattgggtctgcagccaggtaaggcttgacgtgatttttcaagcgctaacaacatgaattctaaattttcgctcatccgctttgatgcccaaatatgtaaatcataaacttaagattttcataccacccggcatgaatgtccattatttagattaattactcatcagctatgaccaaccactcgtaaattaactcacactggccctttgatacttccgcttctggcactcagcagctcctcgaagccggcagctttgagcgaagagcggacatacaagaagagggaggctggctgatcccaataattagtttttaagttacgaagcatgctaattggaaaatacgccataaagtgacttccgatggtatggttacattcttaccactaaaagaggaaacactaatgattgtaaggacctggcacggttgtgttccactaaaacatgctgaagcttttgcgaaacaccttgagaaaacaggtgtagagcattcaaagagcatatctgggaacataggcgcttgtgtgcgtagagaaacccagggtggctgggagcatttttttctggctacttactggcaagatctacaatcggttaagacatttgccggagaaagctatcacgtagctgtgacttacccagatgacgaagaatttgaactactttccgatccctacgtattccagcatgtagtaggaaacgttgcaccgctttagcttcgtttccgggataacctgtcggttacccgaattttgtataatatccaaactcattcaacgtgctgaggtctgctcttggcactgagcgaatgaagcatgtgaggaaggtcagccatgagcgaataactgacgttgaggcatctaataaatcgtctcgatttttacttttctgacccttaatgtcctgagtaacaaatcatacaaactatccacagcagaagaaccttgagaagcacggcctctgaacaatgctactttcataggttcaagaggccccaaaaatgtccactgccaagaatctgcaaatggggtggcacgctgcactaggttataactgctacagccacggtaatctgtcccgataagctagagcagttatacaccaccttataatttcgcctgcatcgctaatgcattgaaagcaatgcatttagcaaggcttgtattttcataagccgctatgggtaatgggtcgcaactccaaacgcaggaactttattaagcgtttcaagacgataaaatataaggatttatttccagtcacgtccacatattgaccacatcgattgaaaaagccccgcaattgcgggcttcatgtttaggtaaagtaataaaaaaatcgttctctaaaaaccataaaacttcacttgactgttgtgagtcatgatgagatttcatgggaaatgctagcttaagtcttaatgtgaaattagcaatttattcaaacaatcatgtagttttgtagttctaaatgtgtgatgatcgtaactcatacgcaaataactatctatctcatctagacgcatgttcttatttaaagatatatccgttccatacatcatttttaatatacatgtgaaatcatgtccattgcatatagaaaagtgatctggtgacattaattctaaattacgcatttcattatataagtctgccgcattaaaatgcccaccggcacgacttctattaattacattgttgatgtatttattctcatcgactaaaacatcttttccattaatacttacaaaatctctgtgggttattcctttgaaattaaggttgctatgtgtacgataattataccatttaagaagtccaattttgtaacatgcacaaaggatatttatctttagatcacggcagaatccctcagccagttccccttggattaattttctatctgtgtgtgacataatgaatttatcaactactccacctttcactaacatcatttcaagatcatgagcatcagtataaaaaacaccttcgtaaattattccgcttaactcatcaaaatcagcgtcacatacaccatatacagcatcattccctgcatgacgtaattgactaacagccgatattacctcgcgctttccattttcaggtgattcataaatcatcctattatcaagccggtatgtattgaaaaatcggatatctgtaataccctcaactacaatcaatatacgacgtcgattcatttcgtttctgaataaaagcaccatactactcagccaatcatcttcgctcacagcatcgcgtaatgacgtcatttactcggttccttctgaaaactgttgactttcattattatttttaattatttcatatagatcgtatgttaatgcccaattcttacttattacttgtggtgagtgggtggcaataatgaccttttcatattcattaatcttttgtatttttttaagagaatccaaaaaggtttgttgccaagcaacatgcaatgatatctcgggctcgtctataagaattactttttgggaaacaagatcgaaaatcaaattaaaaagaagaactatttgattctgttcacccgatgaaagcatattgcgatcaatgaaatcaccatttaaactttcgaaataaaatccattctctcgatcaatcatcacttttttaaaagctaaaatcttttcttgtaaaattgattcaaacaaatcaatcttttgatgcaatatctgaaatggtgataatttccctagggcatcttcaatgtatagatccaagacacctagatattcattactactatataggcttgtacttttttcaggcattagatcgctctcagcctgaataagcccatgtcgcatgtaatggcgacgtttatcttgaataccatttaagcgtgtttgaatattttctgatgaaaatcgtttttgttgttctaaacgctcaaataatcgaataggaaatgtagcatctaatttttgtgataatgcagcagaatcatcttgtgcgctttccatcaaatcttttaattttcttgcgcacaaatcaatgactgtttcatcatcagctttgacttgtaatcgatcagcagatatgaaagatacgtcttttttcgatgtgatgtcgcttagcactttggaaaataacggtttatccggttgtggtttttgttttggtttagcttccccccgatgccagcgtatataatatacgtcttccatattagattcatctttttgtaacttgagtttttcggtcgtggtcttttccgaattattacctagatgactcaatatcaagccatcttgcttagtatcatgagcaattgaaacagaaccgccttgataatcaatcttaataaaaccgaacttaagtttacagagaatgtttaattcatttgcaagaataccattgatgattttgagaatcatcgtcttaccatacccatttggacctgtaagcatagtaatctcatggttatccaggggatatcataatcaagtagaccaaatagcttgtttattttcagatgtattaatttcaagttaaaccccttatatagataattaattataaatatttatcacataacttcatgtgattgattatcaatgataatatcattagtattgtaagcacaccttttttagttccacacactttttgagagttccggttttctgatctcctcccaatatcggtgccaggctaaatcagagatccggacctttttggtgatttcggacaaattctgctggagtcaggttatttaacgaggaatgcgggcgaaaatgattatattcctgccgccagtgttcgattttcccctgcgcatcttccagggacaggaaccagtgtacgttcagacattcatccctcaggctgccattaaatgactcgataaaagcattatcagtaggctttcccgggcgcgagaagtctatcgtcacctggttttcatatgcccaccggtccatcgatttcgagataaactcactgcctttgtctgtctgtagcctttgaggaatacgccccagagactgttttaatcggtccatgacagccaccacatcatcgccacgcaaccccctggccgacctcgatcgccagacattcccgactaaaattatccactaaagttagcgccctgatcctacgccattgaacagattatcagcaacgaaatccatgctccagcactgacctacagcgagtacctgaggccgtcctttcctgtgtctggcggtcacatgccgccgtggacgcttcgaacgcagattgagcccctcaaggcagtaaatacggtgtgttttcttacggttaaccagccagccttcacaacgcagaagaatatgaatgcgctcgtagccataacggatccgtgtttcagcaatttcccgtatccgataagtaattgcccgatcatcgcgatggctacgatagttgtatacagtgcgactttgcatcatcagcctgcaccctctgcgtacgccgatacggtacgccgccagcagatattccacagcatcgcgcttctgcagcggcctcagagcttttttcggatgacatcctgcagcatctccttgtccagactcagatcagccaccagtcgcttgaggcgctgattctcttcctcaagctgtcgaagacggcgtaattctgcgacgcccatgcccccgaatctcttattccaattgtaaaatgttgcctcagaaatccccatctttctgcagacttcctcgacccgagtgcctgtttcagcctgtttgagtgcaaatgcaatctgttcttcggtataacgcgtctttttcataacgaatgacctctttttggcggaaaagaaggaccgaaaactctactttacagcggtactgaatgaaggggaagatcatttctgccatcagctggtactcttctgacgtcaggttgttcagcgatttagtacttaatggctaactcgctggtatctgcaacgtccgctcctggcacaaagcggaactgcggcagggcaacgtccgctctgagcgaaatatagtcattcgcaccctgagaattacactattaagtgattcagggtatgcgcttactggttatgaagtggtttactgaatttggccacctgaacagaggtgatatgctcacctcagaacaacacaggtgctccaatgaaaagaagaaattttagtcctgaattcaaacgcgaatccgctcagttggttgtcgatcaaaactacactgtctctgatgccgctaaggctatggatgtcggtctttccacgatgacgaaatgggtcaagcaactgcgtgaagaacgtcagggcaaaacaccaaaagcctctccgataacaccggaacaaatcgaaatacgtgagctgaagaaaaagctccaacgtattgaaatggaaaacgatattctaaaaaaggctaccgcgctcttgatgtcagactccctgaacagttctcgttaatcgggaaactcagggcgcgttatccagtggcctctctctgccacgtgttcggggttcaccgcagcagctacaaatactggcaaaaccgtcctgaaggttctgtcgcgttaacggagtgaagatgatgaaatctgcgctacctgttttttcaggctgccagcagataaaattgttctgcagacgacaatccttcgccagcttgatgatgaagctgtcctttacggatcatgtttaccagctcaatacccgcaagtatggtctgtgcccgccggaatgatttgaatcccagcatgggtcgcgttcgtcgtttgatgttccggtgatcctgctccacaaggttgttcaaatatttgttctgcctgatcgtgatgctttcttcatcgggtttgtcggcattgagtgtggccaacgctgccgtattggcgctacttttatcaatggttaccctttctggcccaccgtggtggcgaatagccttacgaaagaagcgcagtgctgcgccggcatcccgcctggcggtcagcaggaaatcgatggtctgccctgcggtatcgacggcccggtacaggtatttccactgccctctgactctgatgtaggtttcgtccattcgccagcgtcgacccaccgggcgtttataccgtcggaacaccttatccaacaggggcaccaggcggatgacccaacggtgaagcgtcgaatgatcaacaataatgccgcgctcggccatcatctcttccagattacggaggctcagggaatacgccagataccagcgaacacactgggcgataacatcgggggataatgcaggcgttggaaagattttcggatcagggacatggtcaggcaacatcgtaaaaaaaacagcatgttacctgacgacgtcttaatgcgacagaaccttatagagataatgaatcttcctgaaaagcttgaatcacgttgttacttgcggccatggcctaatagttagaccctgcaaccactattagtcaccagtgttctgataaagtccgctgtgtgccataagcagacgttgctgacattgtaccatattgatttatggaaggtatctcgaactctcatgagttgaattcataaagtttagcgatttatatataaagttttatcaatagttgaagtttatactgcttcgattcagttctcatcgttgtgttctagcatgcactttcctctggagtttatatgaaagatatttacgtcgttatcggtgccggttcaattggacaagcgatcgtgcgtcgcgtaagtcagggtaagtcggtacttctggctgatttacgccctgaaaataccgaggttgcggcgaaaatactgcgcgatgcaggttttgttgtcaccactgcgcaagttgacgtttcatcgcgcgaatcaattcaggcgttagttaacatggccactcagcttgggtcagtaaaaggtgttatccattctgccggggtatcaccctcacaggcttcgcccgaaaccattttggaggttgatctttatggtactgcggtggtgttagaagaatttggacaggttattgcggagggggggctggtatcgtgatcgcttcacaatcaggtcatcgcttaccaccactctctgttgagcagaatgaagcgctcgctgttactccgacagaagaacttctggcgctggattttttacaggacactgcctacaccgattcgctgctagcctatcaatattctaaacgcggcaacgctttacgcgtgatggctgaagcagtcaaatggggtaagcgaggagccagagtaaatactattagccctggcattatttatacgcctcttgcaaatgatgagctttccgggccacgcggtgccggttatcgcaacatgctcgaacgttctcctgctgggcgtggaggtacaccggatgaagtgggggcgctagctgcactgttgatgggaccagagggcacctttattaccggtagcgatttccttatggatggggcgttacggcatcctattggtatggcgacctaaagccagtaaaataagcggtctaccttaaatactgaaaggcgcattcagcgcctttcagtatctaacaccgcataacgatcccttaatgtttgcaggaacgcctgaaaggcaggtgaaagtaagcgacggcttggatagtaaatatgatagccagggaaaggcgggcaccagtcatccagcacgcgaatgagctttccttcagcaatttgcttaatcacttgatcttccatcacaattgccaatcccagcccttcttcagcggcttttgcagcagcgataatattattaacaataaattgcccatcgacccgtacatgaagctctcgctcccctgactaaactcccagggataaattccgccagcactttgcatgcgcatattaatgcatgaatggtgggttaaattctgtggagttcgtggcagaggatttttggaaaggtactccggtgagcccactaccgccatacgaatatctgggccgatacgtagcgctatcatatcctgtgcaatctgttcaccgagcctgataccagcatcaaaacgctcactgacgatgtcggtcagtgctgaatctagtgataactcgattttaatatccggatacgcgtgcaatgtttctgctaccgccggccaaataagcgtatcagccgcgtgttgaccggtagtgattcttaccagtccggctggtttttcgcgaaactggctcaaggcttgtaagcggttattgatatcgcttagagcgggacgcagtgtattgactaactgctcacctgcatcggtgaccgaaacgttgcgggtattccgaattaacaaacgcacgcctaatcgttcttcaaggcgtcgtaccgtctggcttaacgaaggttgagaagtggagaggcgagcggcagctcgcgtaaaactacgctcctcagcaaccactaaaaaggcagccagatcaccgagttcatcacgtagcattaataaattccagatataggttcattaagtattaagcatcttatcacctaaatgaaggcaggataaactttcattatcactggataacatatgcagcattaccggtgttaacgcacatgaagattcaacgagcgtgttagcacttaacaaacttctggagtttaagatgtctaaagaaatcgtggttatcattggtgctggcggaattggcatggctatcgctcgtcgccagggttttggcaaaaccgtgctattggctgatttcaatgagaacacaatgcaaaatgcggctaagcaactgagcgatgctggatatcaagttgaaacctgtcatgtcgatgtcacgtccagggcttccgttgtgtcgctggccggttacgcagcaacactgggcaatgtgatgcaggtcgtcaatactgcgggcctgtcgccgaatatggctccggtagaaaaagtgctggaagtcgatttgtatggcgcagccgtggtgtttgaagagtttgaaaaagttattgcgccgggtggtgcagggctgatcatttcaagtatggcagggcatatgatgcctgctttaacccctgagcaagatcatgctttggcttacacaccaactgaagaattactgaagctaccattcttacaacccgaggcggttcctaataccctggtggcctatatgatggcgaagcgcgctaaccatttaagagtacaggcttctgccattacgtggggcgataatggtgctcgcgttaattccatcagtccaggcatcatcgtcacgccgctggctcttcatgaacttaattcagaaatcggtgatatctaccgagcaatggttgatgcttcgccagtaaaacgtatggctcctcctgaagaaattgcggtgacagcgtcgttcttactcggtacagatgccggatttattaccggtagtgatttgctcattgacggtggcgtcattgctgcgatgcgcgcgggtaaacttcagacgccaggttaataatcattcattgagtatcaacctaaaggaggaagtcattcctcctttaggttgatggtaaaattaacgatgaaaactcttatttaggggtcgccggatcgttagcccgagtaactacgcgttatctgatttcgttaggcgtgaaacggcaagatcgataaatttcctgacccgctgtggctgtgctttacggctgccgtaaatgtaggtgattggccacgtgctctgtcagtaaggggacgcccgtatcagggttgccgcagatagtgatgagagctgtgcaatgacctgcccgctaagtgtggccttgtagtggtcaacataaacaggccacagctttagagtttttcgagaacaatcgttctgattcattcggcgtcaaaccaccattatattgatgaagtctgagctggctgtaatatcctgtgatgtaattcgttattgccgtgctggcttcgctaaaattcgcgtagccattatcaggtacccactctgttttcaggcttctgaagaactgtaatgtccgaatagattgatcattgccatttcacgtgcctgacaattccggattaaacacagtaatatctcgagcccttgactggtttttccctgaataatctgagcgataaaatagccgcgatctgccatagcttgcgcctttactaacgggaactttggccggtccagaatgtataatgctgtttatatggaaagatggtttgaagttcagtgcccgtcactcagtcgaagctaataaaatacgtgacttagcacttatataaccatcattttaaaataggctgccattgaatatattaagaactactccatggcaccgcgtattgacaatatatacacaatcttataatgtatatccattgtcaatacaggagatgaaatatgcgtgatgctgcgatcaatttgcgtgctttgccggaacaacgtgatcttatcgatcaagccgccagcctattaggtaaaaatcgatctgattttatgttggaagtagcgtgcgagcgtgcgcaggctatactgctcgatcaagtatttttccagttagattctaaaaaatttgatgaattcacagcgttgcttgatgctcctcaaaaggcaaatcaggggctggaacgtctgatggaagtaaaagcgccttgggcatgagtttacaattgtcagctcccgagccacttaccactgaacatatccttgatgactttggttgtggggaatcaacgttagatgaatggctaaaacggcgtgctctgacaaaccatttaaacggtgcaagtcgtacttttgttgtcgcgactgacgataaaagtgttgtaggttattatgcgcttgcagccggcgctgtgacacacagggaagcaacagggtctgttcggcgcaatatgcctgatccagttccagtgatagtattgggaagattggcggtcgaccttcgcactcaggggctaaagctcggcgcgtcattgttacaggatgccgttcttagagttcgttcaattgctgaaaacacaggtgtcagagcattgctcgtacatgcacttcatgaaccggccaaacaattttatgaacactatggttttacgtcatcgccaattaacccgatgacattgatgttacgcctttagtattcccagcggctgtgaaacatagcaagttacgagatcgaaaataccaaaccaataagtaatacttcataatgatgaattgtgatttatgttactttgtatttttataatctagattactattttccataaggtcggtcatcgcaccttcatgtgcctgaagattacggatataacgcattaatgtttcaggctttttccatgtcccttcctgcataatctgagcgacagcatagccacgtcccgccatatcctgcgcagctcctacgcgggcactgtgacccgtccaggtcatgtagcgtcctttatttggggtgatagtttcagctgttccaatcgtacgccaggcctgagtgaagataaattctatcgcaggcgtgctcagcggacggatgacggaaagagttgcactcccagagcgatgcaccggacaaaagagaaaggcgtcaggttctgaattgatacctgagacagataaccactcagttagccggcgggaggactgcgaacttagggacttgaccaggcctcctgtctgaacaatagttttggtataactcacattgaggattatcctgccatccggcgcccgggagatatctcgaacgcgaagtcgtgataactcactaatacgcagcagcgtgctataagcaacatgcagaaatgccaaatcacgtttatggcgaagcgatatcgagtcagaccataacgcatcaagctcaagcaaatcctcgagacgaaatggtacggcctgaccagtacgctcaccggtgacaaccgcaacacgattgatcttcttaacggcccggaacaccagcggcgcggagttaggaggggggaggccagcgttacggtgtaacatcgcaatcaaagaactgtgcgtcgcaatcgtcgaggaagctcggccgttctcttgcagccagttcaggtagtcacgaaggtcggccggaagcatgggcaaaaaagagcggctattttcaatcgaccatttgtggcagatccgcataacactcatcagttgtcgccaggtattgggcgaaaaagcctctttgtcctgaacaaattccttaagcctggccagaacatcctcttcagcctggatagccggtaacgcctgttgaattggtgttaatttgctcatatttggcttaaaaatcggactcccggtcgctgacgacgctacgtggattctgagaatgatgcaggggatttaccttgcagatttcacgtagagcaacctgcacgatttactgcaacaaaatcatcaacacctataactactggttagattaccagttacttcagacgatggctaactttatataagtcccattatataaagttagaaaaagacaaaacctgaccttctccccgttgattagtacaccgcgatattattcatggtcacgaataatgtcacaatcaaggagacgggcaaattatataataactgcccattttattatggttgcttatttaccagcctgaagtttggctaaagattcgactattgtattgaaatccaagaaatgaccttggaaatattcggttgtcagatgctggactaaataacccaattctaaatttgagttgctcttggtaaagagagcataaataaactccgcgagtttactttcccgagaactcactttattcccgtgacgggccgtaacagcctggctgcatgcatagaagacgcgatcaaaacacgcactataagggttaatgtcaaacagctccttacgccacgattgattgtgtatgtttagatgccctaaatgtgtctttggacaggcaacataattgataaatatctggctcataaaatcaaaaatatttatatctgggttgaaacttcctgagtaatgattgatcaacgatgataggtacaccccatgtggatccttgactgatgctgccagcttataaaaatcatttggtagcacagggtaggggaaacaacctaaagcgtgatagataacccttcttctctctctgtataagaggtttccttcacagcttcatgtaatattctgtacgtattattataacttttattgtggaaattaaaagcataatcacaactttttgtgtctactgaaaagtagtttaaatcacttcctttcaaggcataaagtaattttgcaaaggatccattgcctattttatccagcaagaacatttctttactatagtcttgcattgaaagtgaataaccttgtatgcaggacctgatttctttcaggttttgatatagcgagggatgatactttacaatatgatgcccttgatgcaataacgggtttccattggagtctagcgtgagataattataagtattttgttctatagaggttaaccagttatcgacagcgttaacatgttcatctgtcatatgaaatgttattttcttttcgataaaataacgagttaaggatgttaagcttaaataacaaattgtggaaatgtccgtgaaaaccgctgcatccaacatattgccattgtttaccaatccgcctttttttgcctcttttgaaaccagcacttcgagggtgctttttacaagatggttaacatctagcaacgaggcgcgtaaatgcagaggaaagttttcgttgtttattacacgttcttcaattgggttattattagccccgttcttgtaagaagagaagaaatttgcttcaccatctcttctggctcactggatagcgtatgacttgcaaaatggtctaaaccctcattgtattcctctctcaactttcccgacaagcgaaatactgcaacataaggagggagtttctcttgtaaagtgaggtgagtgaatccatgatctattgtttcacctacacggatgttaaggagtttttctccaattggagagattttatctagaatgcatgaagaccgtgttttattattgctaatgataattttaacgtactctattccatttttattataaacaaagcctcccataatattatctatgctgttcgacggagtaaattctcttttgttttctgccatcttaaccctcaggcatgcatcagagacaaaccgagcatttttttcaggatcattaacaaaaattttaacaatagctcgctcaatgacttcataataacctaattcagaaagcgttaaaaataaaactgacaactgatagcaaggggttagtaatattttatcatcgaggtcatgaataactttttttatttttttgtatttttttaatactcgcagtacgttaattttcaacactataagtctaatgtcttgttcaatttccagacaacttaatatctgatcggctttttcggcttgcgagtgaatgagcaaacagccggctactatgcaatgcacttctgtcgttttatcttggtcatcaatagtttcgtacaacttattaagttgtagatattgcttggcttcattgagggaaaagaagtattgctcaataagaggcgaacaccatgtatttttctccaaatgtatcagtttggaaaaaagctgacatgcttcaaaactttttcctttctcttgcagcaatgacattaagttaagtaagaataggctattgatctccttaatattgaggtcgtttctttccatgagaacgttcagcttttcatcgacatcatcattattatccaagtgtaggctataaaccaactctgtaagttcattatctaatgcgtcttcataatttacgacgatacttcgagtgcgcagccagttttgaaagtcagcggcttgcattattttgctgaccagaattatatcttgagtattaatttcttcttttcttacgaggctttcataaatttctctgttttcctttttgaaatattcatcccgttcttcttctgaaaaactgtctaacaacgcttttcttgttttctcttcatttaagcgagttgctagactgacgttaaacttctcaaccgcatcaatatttatgaggcaaatatcatttagttcagagtattgttctttggtgttaataaataaaggaactgcgatgttcaacagccttcgatcaggatattcgctaccacgataaagcgtgatggtttctgaaatgatatccgctatgtgatttttttttgattgaggtaggagccaataatctgtttctatgaatgttgcattcaacattatggccttacacattagaagaattactttggaattattgctttcgaattcatcgtgcatgaaacaggctatgtgaaaagcctgttcggagagttcgtttttaagaagcccgttgataagtccctgtaatttattttcgtttaacgtgtaaagagtcgatttatcttcggctatggctagaagctcttctttatctgtgagaaaatcataaataaaagactgcgagtattcccctatgaatacagcggattgcatacgcgcttttgctgcttctggcccccttttttgtgatcctctctcatcaacattgataaggctaaatcacctagcatagtattatgagttgtatcttgtatgttctttaaatctgtcttggaaagactgatttcggggttttctagaacatcaattctcatgtttaaaaggcgcaaaagcgcctttgaatcattatttagacttccaactttcatcagaatttcaatttcccgccgggctgttgggatttttctatcattgatatccctagcaatagaccttacattttcttttagatcatcgggaaacgttgtattaataatctgggaataatcattataaaattcgttaattacaattttttcatttacattatcgccagacccactgtgcgtttggtatgtactttccatcaattttcaccgtatatggttttatttcctccgacattatcacccgagcctgagtgcgcctgaatgatttgggtggtcgccttcgtttcagattttttcagtaatttgagaatgtctggcgccgcatccagtcttttctcaatggcttttggactcatgtcttcatctaggttgagcttttcgattttttcggcgattaacttgatgttttcttcatttgtgatgtattcggctaatttggatgtgatagcatccttggtgaaagtgataccgcttttgattaaatcgtataagcctctggcgataattgatgttgcgatagcgtccatagatacctcattaagtaaaatgatttcaaccacagcaatttatcgctcccttactacgattgcaattgctgtaggtgcgcggtataaaatggagttttacaggcattttttgagctgcccggtaacacaactatgctgccgtctgcgaacattgttgtaacgccgattctgctaattttatctacacaattgctgtttgatctgctccctgtacaagccggttattgtgtccagttatctcgcccttatcccccacttctgtgaataatcaacatctgatgtcattgccagctggtatggaaataacatactgtgcttatcgcgccagaagggcccttcccgccctgccgcagacagactggccattcagggcgtggagcagacgatagcaacacatagcgtaagaaaatgacaaggtggataactgcacgcataacaattccagccatcaaaccgagtatagcattgctatgttgtcagaacgtcaactgtacttttgccgcactttctttatctgacgctgtttccagggcggtgacggcatcttccatgctgaattctgcagagagtagtgggagcggatttattttaccggactccagccatctgactgcggtcgtaaactcatcaatgaatcggaatgaaccacgcagctgaatctctttcaccagtaagggccaatcggataatttacctcagcagttcccatgcccagctggacgataatgcctgctggacgtgtgtaagacactacagaagcgatggcagccgctgcgccagaggcttcgaagcagacatcaaaaagtccccatcggcactccacgatgagctaattatttcgtcacgcgggtcatacgcggctgaagggttctgtcgcgttaacggagtgaagatgatgaaatctgcgctacctgttttttcaggctgccagcagataaaattgttctgcagacgacaatccttcgccagcttgatgatgaagctgtcctttacggatcatgtttaccagctcaatacccgcaagtatggtctgtgcccgccggaatgatttgaatcccagcatgggtcgcgttcgtcgtttgatgttccggtgatcctgctccacaaggttgttcaaatatttgttctgcctgatcgtgatgctttcttcatcgggtttgtcggcattgagtgtggccaacgctgccgtattggcgctacttttatcaatggttaccctttctggcccaccgtggtggcgaatagccttacgaaagaagcgcagtgctgcgccggcatcccgcctggcggtcagcaggaaatcgatggtctgccctgcggtatcgacggcccggtacaggtatttccactgccctctgactctgatgtaggtttcgtccattcgccagcgtcgacccaccgggcgtttataccgtcggaacaccttatccaacaggggcaccaggcggatgacccaacggtgaagcgtcgaatgatcaacaacaatgccgcgctcggccatcatctcttccagattacggaggctcagggaatacgccagataccagcgaacacactgggcgataacatcgggggataatgcaggcgttggaaagattttcggatcagggacatggtcaggcaacatcgtaaaaaaacagcatgttacctgacgacgtcttaatgcgacagaaccatgcagagcccgcattgcctgctgagattccgttctaggttgcacaaaacgcatagacggacgcgatgcagcttcacaaatagcttcggcgtcgacaaagtcgtttttgttacttttaacgaatggacggacaaattgtggtgatatcagctttggaaaatgccccaacttttccaacttgcgtgccataaagtgagagccgccacaggcttccattgcgatggttgtagcggggcatgtcgccaaaaattcgattaactttggccgggtaaattttttacggtaaacagccttgccgcgacgatcttggcaatgaatatggaaagagtttttacccagatcgataccaatgagcgcaatgttttccatgatagttctccgaatgaaagcctatcctcagcatagtaccgggaaggagggagtgaccatctcattaaacatcctacgttaaggatgtttcttatacagattgacgtgcgatgaccatacccccgcagctctgagccagcagatatcgcgttattcctgacagtccatgatggctttaattgtattctgcaaggcattctggtgtggtcgcaattgcgtgatattgaacagtccgtctgtcacatcacatcacataatgcggccacacctggaggatggcttcatgcccagactttcgccacacagggctgattcgggatggttaacctgcgcatgcagctctccggctgtttcattccttattcaactgttgcaaccgaatcgtcatgagcagatgaaggatccccatcgcaccatgggcccagaaataggtctcaataaagaccgtcagaaacttatgcaaatgtagaacgtcatgtaccaggaccgaatcgggaccgtacatcatattcagaatgaaccagagcccgccgacagccgccacaccgagtaatgacagcacacccagtccctgaacgatggcagccatacctccggcatgcgcttcgggcaggcgaaactgacgcagcgtcctgaaatcgtcggtgacgccccgaaaatccaggtacaggtatgagaaataataccgggcaccacgctgagtcagcatccagaacagcataaccacaccacaaagcaacagaccaaacccggaaatgatgtgcaggaaagtcactatacctgtcaacgaagactgtcccagagcctcagtttccgtcatgttcgaattgataatctgagccagaaccagaacggcgacaacaatatgaagtccccgaaagaaaggcgtgtcctgatggggtaacgcgcgacgaagattgacggccatagctttttcacctttaaccagtggtagttctggcaatctgacggaaaatcattaacgaaaccttaacccactctctggctcttcttgacaaccaccctaaatactttagaattatctaaatttaggaaattctaaagtatttagccatgaacgagatgagtgaactgcaaggccaggcggaaaacgcggccgcattgctgaaaacactgagtcatccgcaacgtctgctgatcctttgcattctgaccgggagtcctggtacagaggccggagagctgagcagactcagcggactcagtgcttcagccacctcccagcacctgtcacgaatgaaatctgaagggttgattgaagggacgcgtcaggcgagatatatccgatatcacatcaaaaatgacgcgatatttgcggttgtacagactctgaagaatatttactgcccgggagaataaaatgaccactgtcaccgtgacgcctgctgaaattaatgtacagcatggcaaaccagttcttctgattgatatccgcagtcatgatgaatggcgaagggaacacatttccggcacacgttccctgccgctggaacaacttcatgccggttgcttcagtgagaccgggctgagcgaaacggatacggtcattttccattgccagagtggtatgcggaccgggaacgcggcagaaaaactcagtcagtttgtgtatccggcacaggcactgatcatgcagggaggcctcaatgcctggaaagcggcgggctacccggttatcgttgatcgccgccagccactaccactcatgcggcaagtacagattgccgcaggggcgctggccctcggcggaagtctgggcggactatttctgacctctgtgctgtatgttattcccggatttgtgggtgcgggcctgatgcttgcaggaatgacaggctggtgcgggatggcaaaactgctcgccgttatgccatggaacagagagcatgaataatttccggttcagaaagagcgtaattcagatgcacctgtagtttagaacagattttctctgagtcaggcgtccgccaatctgttgctgacggatgcccggaatgatcatgaaaaataacgtagtcagatgactctatattttatgatgtcatctggactatgttttatggaaaaaaagcagtctggaataattagcaaacgggcaattctttaccctgataagggtcagtgtggatcatgacatccagcacatttttattttccagaaccgcctgacgtactgctctggcaatatcatgcccttcactgacagaaagctcgccgtcaacttcaatatgtacatctaccagtatgagatcgcccgtttttcgtgttttcagatcgtgtactccgaggacgtcagggacagcgagaatagtcgctttaattgcagtttccatctcagtgcttaccgaacgatccatcaggtcatgaagtgcattggcggcaaaagtgtagcccatacgggcaatcagaacaccaaccactattgctgctaccggatcaagccacggaaagccaagtaaattgccgacaatcccaacagacacgaccactgatgaagctgcgtcggaacgcgcatgccaggcgttggcgatgagtagagacgactgaatgcgtgtcgcgacagccagcatatagcggaaaagcagttcctttgtcaccagcgcgaacagtgctacccacaacgcaacaatatgcacctctgaaatggcttcagggtgccacagcttgccgcttgcggaccaaatcataatggacccgacaaggaacaggattgcgccaataatcaacgacgccccattttcatagcgtccatgaccataatggtgatcttcgtcagaaggcttgcgactttttttattggcgatcagaacgacaaagtccgacaccaaatcagaaaacgaatgtatgccatcagcgattaatccctgtgagccagaaaatatccccagtaaaatctgaacgcaggataacaatatatttacagctacactgatcatcgtacttttttgtgccgccaatgaacgattatgatattcgttatcattgcatttattttcattaagctccataaaacctcattaacaccccataattcaggatagcaagaataatataattcagacccaaaggtgttaaacaggaaataaaccagatcaggttcattgaacgcaattaatacgggctgaaacaggcggccttgcctgcggccattcagcgcagataatgtttgcgttaacaaaactgatatattttcttcctgaaatcaacgatacccacaaaaacacatatgatttatcatatgtgtgcatcgagattaccgggaggaaaaatgctacagcctgttcaacttttcaaaattctgtcagatgaaacccgtctggctatcatgatgcttctccgggaatccggtgagatgtgcgtgtgtgatatttgcgcggccaccgccgagtcgcagcccaaaatttcccggcatatggcaatccttcgggaggctgaactggtgctggaccgtcgggaagggaaatgggtccactaccggctctctccacatatgcccgcatgggcagcagaaaccatcaagatatcctggcactgcctgcgggaagacgttcgtcagtggctggataaatcagcggcatcatcctgctgagatgaatcgaacacattcttttaatcatatgtaatggagtcggaaatgttactggcagggagtatatttttactgacgctgatcctggttatctggcaaccccgggactcagtattggctggagcgcctgcattggtgctgcgctggccctggtttctggtgttatccatgtgggtgacattccggtggtctggaatatcgtctggaacgctaccgcgacttttatcgcagtaattatcatcagcctgctgctcgatgagtcgggctttttcgaatgggctgcgttgcatgtttcgcgttggggcaacgggcgtggtcgtctgctgtttacctggattgttctgttgggtgcggtagttgcggcgctgtttgctaacgatggcgcagcgcttatcctgacccccatcgtcatcgctatgctgctcgctctgggtttcagcaaacggacaacgctggcctttgtcatggccgccggttttattgccgataccgccagcctgccgcttatcgtgtcgaacctggtgaacatcgtctctgctgacttcttccggcttggctttacggaatacgcatccgtcatgcttcccattgatattgctgccatcgccgccactctgggtatgctgcatctgtttttccgccgggatattcctgcaacctacaacgtcactctactgaaaacacctgccagtgcgatcaaagatcccgcaaccttcaaagccggttgggttgttctggttctgttgcttgccgggttctttgtgcttgagcctctggggatccccgtcagcgctattgcagccgtcggcgcagcagtgctgttcgccgttgcgaaaaaaggtcatgccattaataccggaaaagtgctgcgcggtgcgccgtggcagatcgttgtgttctcactgggtatgtacctggtggtctacggcctacgtaacgcgggtttaacagaatatctatccggcgttctgaatatgctggctgataagggactgctggcggcaacgtttggtacgggttttctgactgcattcctgtcatcggtcatgaacaatatgccaaccgttcttgttggagcactgtcgattgacggaagcacggcgtccggcgtcatcaaggaagcgatgatctacgccaacgtgattggctgcgatttaggcccaaaatcacgccaataggcagtctggcaactctgctgtggttgcacgtcctgtcgcagaaaaacatgaccatcagctggggatattacttccgtacgggcatcatcatgaccctgcctgtgctgtttgtcactctggccgcgctggcgctgcgcctctctgtcactttgtaatgagatactgatatgagtaacataaccatctatcacaatccggcctgcggcacgtcacgtaatacgcttgagatgatccgcaacagtggcaatgagcccaccattatttattatattgaaacgcccccggctcacgatgagctggttaaacttattgcagatatgggatcacagtccgtgctctgttgcgtaaaaacgtagagccttacgaccaattaggactttcagaagagatattcagcgatgagcaactgattggttttatgctcgaacatcccattttgattaaccgtcccatagtggtgacacctctaggaacccggctgtgcagaccttccgaagtcgtactggatatactgccggagcctcagcaaggtgcattcacgaaagaggatggtgaaaagataactgacaagtcaggcaaacgactcaaataattagcgagccccattctcaggcactgaatgctgctttcaccctgagaatggtttgccgggtggtgttgaatccacgggcaacggcactgacactgtttcccgcattgaggctatccatcacagctcgcttttgggcttcagtcaacgtagacggacgaccaaaacgttttcctgatgctctggcacgcgcaatacctgagtgtgtgcgttcaagcagcaaatcccgctcaaattccgccacggctgaaatcacctgcatagtcattttcccggccgggctggtcaggtctacgccacccagagccaggcaatggacccgaatatgagacacggccagttgttcgacggtttttctaatatccatcgcattacggccaagccgatcaagtttggtgacaatcagcacgtcaccattttccatacggtcgagcaatctgataaatcccggtctttcactggccgcaatcgacccactaatatgttcctctattattcgctggggtctgactgcaaaacccgccgcttcaatttcacgacgctggttttctgtggtctgctccagagtggaaacacggcagtaagcaaaaactcgtgacatgggaaactttccgtacggaatgggtgtccgaattatagcgtctgtacgaaatggatttcacctactttcggacacattgacagggtggtgtacgaaaccgaccggtttcggtcagtgcaaatcaataactcaaatgaactatatgcaaaggaggcatttatgcatcggagacaaatactcagcagtaaagaaaaagaacacttgctggttgtgccggatgatgacgttcttctgatgcacatgtacttttgggttctgtcacattaaggaagtgtcaggtaacatgctttttttaatttttcttaccatgtacctgatcccaaatgcctttaaaagcctgcattatcccaccaatgttatcgctcagtgcgtccgcaggtagctgacttattccctcagcctgcgaaatctggaggagatgatggatgaggggcattatgggtgaccattctacgcttcacctctgggttatccgcatggtgccccggctggacagggcgttccgcaggcataaacgtgccgtgggtcgccggtggcgaatggatgaaatctatatcaaagtcagaggccggtggaaatatctgtaccgggcgctcgatactgaaggtcagacaatagatttcctgctgagggcgaagcgggatgtcgccgctgcctgagtttcttccggtaagccatcctccaccatggtgaaccggagagggtaaccatcgataaaagcggcgcaaataaggccgggctggccacacttaacgccggtaaattagcagatgaatacattacggtcagaaaaagtaagtacctgaaaaaccgagtttagcaggagcaccttaatatcaaccgtcggataaaactgatgacggaattaaagtcgttcaggcgggcacagacgagtctgcctagtattgagctggttcacatgatacgcaaaaggcaatatcagtatccgtccgggacggggtatctccggcagaacagttttatctgttgattgcctgaaaaacaggcaattcaatttttactgatctggtgccgttgatgcgacaaaccctctttattacttatttagatataagttccactcccatgcctttctgttttacgtttgttaattattaccactgagtaaaaagtcatcattttgaggtagataaaaaaacaatggcaggttctttcacatagaacatccctatatctgaggtatttgatgagatttatatggggagcaagggtcatgtactatacaggtgaaatcaaaaacttagcataactcgaccattattactatattaatacctgatcataacaattcttatatagattaaattaaaaaaagcacatcaaacatatcctaacaaaaatgatgagataaggtataaaaatacttaggagtaaaaattaagtaagaaattatgagtgttattataattattataataacttaaaaaaaatgatttcacggactgtgctaagtacgggtattctcagtccgcagttaacttcttatgtattaatgtagctaattaaatcgtattactttagaggttataaatggatattcgaagtcgctcaccaaatttgggggacgtagctgaaatttcaaaaatactgtcaaccactcacaacaatggagagtcatttgataaagacttccatttaaatgatctgattgaaaaaccttggggtatgaatacagagtttattgcgattgtgtttttgatctttggaaactacatatcgatgctaatcaaagtacatcaatgcattgtcatatacaaaaagataccgtgttaatctgcctttccggctctggttatactaagtttcttgatgggacaatacatcaattaaataaaggcgacagtgtatacattgagagaggtgtttttcaccaaacgatagcatcggaaaaccaagggctgcaactaattgagattgaaaatcctagaaataaattcgacttacttaggctcaatgactcttacggcagaaaaaatactgcatatgagcaaaactccgttagtcacgacctattagccccaattaaaaatataggtccaggttcatttatacgaagtgaagacttgcataagaattttaaatataaattagctaatctttcagaagaagatctttcagacgaaaactttattttcatggttggcgtcagtattgatcatcatctttcaggaaagattaatgtgttaaacaaagaagacatcaccattaaaaattacttggggcaaaagacccttttaatttcaaaattttaaatcaaataatattaataaaggattagactatgtcacagaaatcaaaagttgtaatcattacaggtccgggtttccaagatcatgatatcgtttatacttactatcgctcaattgagcaaaattatgatgtttccatcgcaactaaaaatggtgaagctgtaattgggaaatacggtattactgttccaatggataaaagatctaagcctaacatttcttttgatgaattacatgtttcaaactttgaccttgttattttaactggtggtcatgaggctccagatcgggttcgtcaagatcagcgagtcaaagattttgttaaagctatggctgttgagggtaaggttgtcgcaggattatgtcatggcccatggatcatgatttccgcagacgttttacgtgacaagttagcctgcgcctatgttgggcttaaagatgacatggttaattctggagccaatgttattgaagcagatgtagttgtagataaaaatatcataacctgctcatactatgccgaagttggtaagtttatgcgtgaaacatttgcagcggttgatcgctggaagaaaggcgaagttcttgctgaaccactggtagtataaaaaatgatagtcgctctggattttgacggtgtaattatggatggaattaatgagtgcatgcttgttgcatggaatgtgtttaacaacaagctattttctgattttaacaataaatcattaaatgaaattccagattatttcgtagatattttcactcacgctagaaattttgttcgacatgatgggcattttattattccattttacgcaaataaaaatgaagtcattgatagcaagagtttccatgagatttacgaaaacattcctgatgctgataagtcaaaattcagagacgacttcgtaaattatagaaacaaagttaaagaattattccctgagtattggattagccttcataaagaattaattgatttaaaagaaatcattgaccttgatgtagacttgagaattgtctctgggaaagatgctgaatcaattatttttcttttaaagaataaaaaaatacatattgaacctagaaaggttcatggaagaatggttgaaaaagatactgtgctcaaatcgattaaaaatgattctgaaaatgacaatgaagacttattttttgttgatgataatttaaataacgttattgatgcaagtaaattaggtattcaatcgctatgggcattttgggggtttcatacccctgaacaagtacaaaatgcagacaggctatctataaaagctatttttaataatcaagaattactggactttattaagatatctaaaaaaaatgaggtaagaatataatggctattgataagaaaaaagctcttatggttatcacatctcactcggaattgggaagtactggtagaaaaactggttttattatgaagagctagctacgccgtattggaaattggttgatgcaggttataacgttgaaattgcatcaatcaaaggaggtaaagcaccagcagatccaggaagtctaagctcgccagaggaacaacctgcatcagtaaaaagatttttaggtgatatagcaagtttaaataaagtggactcttcactctcggtatctgcggtaaatcctgacgattattcagtcgtttttttaccagggggccatggtactatgtgggatttttctcaatctaaagccctcgcaaatttaattagtcgtagttatgaaaatggcgcagtaattggaagcgtgtgccatggggcggcaggtttgttgaatgccaaaactgcagatggttatcctcttgttgaaaataaacgcattaattcatttactgctaatgaagaaattgcagttggcctagatcaagttgttcctttcattttagagacggaatttaaaaagcttggcgctaaatatgaatgtgctgaaaactttaagccttttgtggttacagatggtcgcttggtaactggtcaaaacccagcctcctcagctttagtggctgatgcagtagttagcgcagctcaagtagcataaaaaataaatatttattaaggactatttaaaatgaaaaaagaaattttagtaggttttggtgtaggtgttgatgcagtctctggatggttgtcttcatatggcggcgaggattcacctagtgatatttctcgaggtatgtttgccggtgaagtaggtacacctagacttttaaatctttttaagaaattcgacataccaacaacttggtttttgcctggacattcaatagaaacttttcccgagcaaatgcaggcagttgttgatgccggacatgaaattggtattcataattacagccacgaaaaccctatttcaatgacgccagagcaagagcgaattgttctgcagcgtagcatagagatggttacaaaacttagtggtaaaagaccgacaggttatgttgctccttggtgggagttctcacctgctactacggatttattgttggaacatggaattaagtacgatcattcacttatgcaccacgatcatctgccatattatgtccgtaagggggatagctggaccaaaattgattattcaaaacatcctgaagagtggatgaaacctttaatccgtggtgaagaacggacttgatcgaacttccagccagttggtctttggatgatattccaccatttatgttcatgaaaacgaaaccaaatagccaaggttttatgaatcctcgtgatgttgagcagttatggcgtgatcagtttgattggctataccgtgaacaagattatggtatttttacctttactattcaccctgatgtatctggccgccctcacgtactgatgatgcttgagcgtcttattactcatatgaaaggacatcccggagtgaaattccttacacttaacgacatagctgatgactttgccgaacgtaatcctcgtaaaaaataaatcatagaatacggccttaaacaaggccgtactcatatcagctattttgaaaatacctgtatctgaaatccttataatgtgttccttaacgaacatgacgctaggctgacgtaaagctgactcattccatacaagataaatttcattttccggcattttctcagtaatgttgattttaacaatccttcctgcatctatttcttcttggcacaaatactcaggcataactgtccaaccgctatgttctctgagcattcgttcaataattcttaaatcgggtacagtaatagagggctgcatatctgtagctataccaaaaatttttttgaaaacatctcgaataagcgtagttgttcatcatatgcaattagcggaaaactttctaataattcagctgtaatcgtttttcccttaaaatctgccgccattgtagccgaggcaacaattatgagtttttccttacctataattttaaaaccatacttttgcgtatcgggttgagatgtagttattgcaatctggcttattccctcattcaagcttgaataaatttttgctctatcgccagtgagtaacttgaagcgtaattcattacgaataactggggaaaataattttgcggctttagcccaaagtagttctgcaggcccaataattgtaacaaccccagttattcgttttctacggtcacgcatcaaagtaagttttgtttcaatagcatctaaattatggccaatttgcttggcgagttcatcagcttcagctgtcggtgtaactccatgtgaacgacggtaaagaggacgcaaccagtgagcgactcaagtgaatggacgtgtgaagagacagcgggctgactaatcccaagtcggtttgcagccttggaaattgaccctgcgcggtaaacatcgagaaaactccttagttgaaccagataactattttttatccttgattaataagatctgctgcgacttaacatttacttcacatgtgtatttgtatcgccttactctatgaaaaccagtgatatagttattattatagctaatataaattttaattattttacttatatcatgggggcattaaatttgattgacaaagactgtgcaacataaaagcacatacattttaaggaattaatatgcctattgttatttatatcttctctctttgtgcttttgcattgggattaacggaatttttagttattggtttagtttcagcaatttctaaagatttgcattcgtcgattgaagctgtcggcatgactgtaacttcatatgctattggggcgacgataggggctccattttaacggcattgacttcaaactggtctcgtaaaacagtgatgctgtcaaccatgttggtattttctgttgggagccttgctgcaactttatcgacaatgttcatatgatgctcatttcaaggtttgttgcaggtttagcacatgccttttttggcagttgcagcaagcgttgctacacagattgttgctccagaaaaaagaggaactgccgtatcctatgtttttgcaggactaacactcgcattagcatttggtgttccaataggaacatatttgggaagtgttattcgtggcggcttagttttatgtcgtaacaatatgtgggattgtaggtcttataggattgatcttctttatgccaatacaaaaactcatagtattgaagacaccaccatcctttcaaagccttaacacagatatttaatcctgtttattatttggagcattaataactgttctaggatatacggagcatttacgctatatacctatattcacctttgcttttggatataactaagtaagtatacaaactgcaagttcaatgatgctaatctatggtatttggctgcagtggaaacattttaggaggaaagttatccgataaactagtgttgataaagccgttgcatggattatgtttttattaacctatccttagttgggattaacttttatggtatgaatacaataattatgtgcatttaatcggtgctatgggtgctatatcatatgcagcagttcctgcaatgcaggcaaggttatatctattgctcatacttatgtgccaagagcagtacccgtagctggactgaacattgcaggatttaattcaggtattgcattaggttcttttactggcggatttataatccacaagtgttggtgtacgctacctcgctattggtggtgcatcgatctcttttataggttatctattttaatattttcaacattatcgaaacgtcagccttctcattcaagtgagcctttatggcctctaaactcatgatcactaatgtcctttgtgagttcaatatatgactatgcttaatgttattaatcagatagggaaggacaagatattgttttaggtcaaggataggtaagcatggaaagaaggcgaaatgttgttacagtttagactactcatttaacgggccggtgagcgttaaattaaaaacagatcgaatcggcgttaacaatgatgacggtgggtggaaaggttgcttgcggaaacctcattactataatcctcttgcaacggtagattacggtaatgtggtcgatgcaactgttcctgatggtgatttgacattaagggttccgtttggaaaacggagaatatcctaccctaagcctgtttattaagcaggcatgataggcagttttgctctgtgaaagcagacgttgaattaactggattatagaaaatccaaaatatgacaggtcctgttaagcgggatacttacatcaagttcacaggaggttgtaaaggttaaaaaatgtacttagcgtgcgttttcgttcagttgtgcttcaacccttcgtaatgccgacctttgaatgggttcatgtgctgctccttcaactaaacagtggcatcagtttaccatcgccagatctttgcaacagtgccaaaaaaacaaccttaacgtgcaataattttcgatatccaaactgaccccttttggttgtaccttatgatgaggactttctgacgcgcatgttttttggaatagttactgcgttatacaatccgatttactatgtttaacggaaaatttatccctataaaaagaaaacataactaattttgttgcatacttgtctacagtaaatcgatgactattcgttaatgattgtttttattgagtttgatcatagaagtagctggttatgtcgcgaatattaacaaattaatttaaatagttagattatggtgaaacgatata

SEQ ID NO: 10 - DNA, 82542 bp, Rouxiella
ctttctacaacccagccatgagccttaaaatccgtgttttgatggcttctgactcatctttcttgagtggatatgaggttcatagcggcggtctttcagatacgcttccagccatccggcttcataccctttatcctatacacagccggagacttctgtcgggtctgcccgccttaagggcttcaagagtatctgcaaccagctttatgtcgtgggtatttgtaccggcgacaactacagcaagtggtagtccgttcgcatccgtcatcaggcttcgcttgaccccctgttttccgcggtccgtgaggttgcggcctgttttttggaagccgttatcatattacggaacagatgtaaaaaaagattggcctgagcatgttgatgcgattgaaaagcgctatcaggcaaaaatgaacaattcacccaattgctaactaacatgcatcctagaacaaaggcctcgcctgcggccttctacgttgcttgttaaatccctgcgccacattggacttactggtaattctgttcagttgtgctgcacgatctgccaaggtagaatcaattaatcagcaacatgcgaggtaatgatgaagacgggaaccggagttaacacggtacgtatcggtgatgaggtcaagcacattaccgaacttgatgacacgacgctcagttacgagtggtcaaagcttaaaacggagaatgctgaccttttatagttataaaccggaaggttaaccagggctggcgcggctttattcttcgtatgataggtgtgcatttgccggataaagaacgggttatgattggcggcataaatgacagaaaagattccgtctatccagactgctgccagcggcctttttttacgtcctcgctttattacctcctcactggacgtacagtgaattctgtccatttcccgcccctggcgcggcttttcacctttgcactatatctagtggctacttcagctgctaatgccacaacatctagtgttcttctctggccatcgcaggctatcggcccctgccctgttggctcgccacgttctcacctttttctcattggactatacttccctgatggaataagtgtccagaggtgagaacttacgatcccgatttattgcgctggcccgcgccccgtacggtgcgtaaaatcacaggcagtgaagaaggcccgtcgccggtccggatattttactcgggaccggtccgcgtgccgacacaagatgttggcgcggggactggtcaggcaagcacgccccgtgcgcggcaggcttttcctttattccggtgacggactgcataattaacaggcaacggagattgaaaaattgcgagacttacccgcgaactttttcagaattcacacagcgcgatcagcacgatttctcatcccgcgagcaccgacatggcgctggcgctgcggatgcgcaaccttgccgctgccatgcctggcacatcaagtacctgctgccggtcgaggtctcggcgctgatcgcctgcgctcgccaccttaaacagcggatgtttctggacacgctgtggaacaccggcgcacggctcaacgaagcgctggcgcttgcacccaagattttcgacttcagcccgacgctgaaccggcggcgcggcgggtcgcctggaaatactttcgcactatcaggccaacgtcacgctcattacctgaaggcgcgaagcctttcttctggccgtggtaaaggacgcgtgccgaccgctgagcgggagaagatcgcacaagccacacggattgtgccgctgctcgaccccgactatgccaggcgcatggacgaatacttgcagacctttcaccgtggcgagaagcacacccagctctggcctgtgtcgtcgcgccagacggcggcgaactggatcaacgcggcggtcgaggaagcggcccgcgccggtgtgcgcttttcggtgccgttacctgccataccctgcggcacagctatgccatgcacctgaaaatgaacggcctcgatgataagacgctgatggcgctaatgggacacaagtacgcgaagagtttgcaggtgtatacgaaggtgtttgcgctggacgtgctatcggcagtaccctgcgatttacgcagagcgcgaagacgcggtggcagctgcgggctattcaacgcagttaaagcgcgagctcactgtcattaaatcatgatttaatgacagtgggatgtgttgaaaactatatgttgctggcactgttgttttgaaccttcttggctgcattggccgtgagcattttttgccgttcttcttccctggatttcaataatttcaaactgttttgtaaatctgctctggggcttctgacgccttgccatgcatcatttttaattttcaattctttacttatatcactcgataaatcacacacatacctatagcttcgcatactgcttacgccgtaacgcgaagtattggggtgctctggaggatcatcatagatatatttttctaagcgacggttgattgtgaggagtttgatttcgatggattgcagtctataaagcagcgcaggtttgagaaatttatattccccttgagcgctgagagatcaaaaacaggtgaggcaacctgggcttcagccctccagttttcatccactgaggatcataaccgtcatccctggccagcggcacagtcagcggcaaatttatctaacatgaaaattatctgtacctgtatagtttttttctcgttttgatctgctgtattcgacatacaggttgacgccctgggcattattgctgccaggattgctacgccgagccccagagtgatgtcatagcccagtaatgttacgtgtgtatcagccatactttactcctgaattttgcacttactctataaactaatgtactgaaacgctttatgagtaactttttacaacaggactatcaacatatactgcgtccacgtcatctgctcccctacttgtctatcatttttgctttgcctgcgctgcgatagcctcacaatgaacttttccgtataggtgcccaggaaagccgcatcagaccgttattgatgccggtaactgtcagcgtaccaaacttaccaaagaaggccagaatgaaaatgatatggatatggtcgggccgaagaaaggcgaaaagaaagtaactaattaataataatggggtccgtttggaaaacggaaattatcccacgctaagactgttttttgtacaattcggtatcgactgtgcgtaatggccgatatttcccggaccccagcttaagattattacgccaacgtaatcgccactcagattgatatgttcccagcccagaggagaaagatgagataccagttctcattaatcgggatgcctttcgtttcagtgcctcaatggctctttcatatataccgtgttccacaacgtgatcgcgctgtcagcaacgttagcccgctggcgcgtaactctgattctccagaccacgatcctgatttcacccagacgatgcataaagaccgcccgcgcaagagcattacggcctccccttatcagccccgccttacccgtggcgcagaccccggatcacgaaaccagtccagcataaacagtgttcgctgatgccgccaatctctctcagcgctttggcaagtccatttgttttgggtaactggctagcttttcatcatcagtgatgcggtgactgtcccctgtttaatcggaggttgccaggcgtaatacctcatcccagtgcgcctcaatgtctttgaaattcaggctggttgttgatatgacggactgaagtcccggatagcgatcgccttacatgaatgaacagccgtttgtccatgaagatccggatccttggcgaaaaagcgaaccccagcaggtgcatcagggcgaaaacatgttcagtgaagcctgggtatcggtgtaatgctcggtaatttccagatcgctttcatggtacagcaggccatcaagcacgtggttgagtcgcgcacccgactgatcactttggcatagaacgggctgtattggtctgagatatgtgtataaatctgcacgcccggctcctggccatatttaagattgacctgaccggcataacgtccgtgactgcaaccgaaagttctgcccgtctgacgacgacgttgtaccgtcgcccagaatgcggcagaggtcgcgcttctgagcgttgaccagctcggccagcgccgctgaataagtttcatctctgatgtaccatgcctgaataccttcgagtgacgatcttgttgcccccgggcaggattccgccatttttgtcagccccagattgataccgtcagccagaatggtgtcagcaacagtcttccgtcttttggtctgacgttattattttgagatgagcgaagtgacgcgtaaaccctgtccagctgtccacttcttcagtatctccgtaattttcggatggggaagcatgccataaaccaaatcggcaaagggggaaacacctgaaggaacgctgttctcaagcggagtgatttttacgcctttatctgagatatcaacatcgggcaaatcaccggcaagcgccatcgcgttaacttcttccagacgcgatgcaagaagcgtcatgcgggcctgaaggtatgcctggcaatcgtctgaacggccagttgtaactgtcattatgtcggatttctcaaactcagcagccggatgagataatcatcaaaatttctgtaacggcgcgatcctttacccagatatcaccggaacgtaacgcccccttgagttcatttagcacgcaaaattcgtaatacttgcggtcgatccctgaaggagtgagcaccagttttcgccagctttcagggataaatcctgtggcgctgcgggcggaactttacgaagttgtttacggtacatttccgctatggtgtccagcgcatcgctgagcgcctgcgccgcaggtgttgcatgaactgcaatgctgacagcatacgcgggcgtatttacgcagcgtgctgtatttttcggtgatcaggtgaagtgggtcaaaattgcccttacgggacacaaaccgcgtttcctccacgctgttgatgaattcctgccagggaaggacgtcttctattgcagcccaggatcttcgccagattctctggcgttaagtaacgcctgcccgacggtaacgtactgcttcagcttgctctgaataagctttcccgtttgctggagtcgttcggcctgcgtgcgttttgcccggctgaacagagtacccagaatacgctcgtgcagatcaatgacttcgtcagtcagggtggccctagcctctgttattatacaaaccagcgtagcataacgtctgatatcggtgaattttgccaggtctctgctgctcattttcctgccctcacgcgccagtttaagcaatctgttctggtgaacggaaagcgcaattccatcaggcaatctcagcgcggcgatggaattaagccggtcgatatgttgcagcacgtttttaccgttgattttacccggaggctgaagtagccaggccagacgggaaggctgttcaccctctgatatgagcaggctgtcgagtgctgatttattctgctgttccagttgcgcggtaagtgccgaaaatacggatcggtcagcgagcgtgatgacttcggcaagcgtccgttcaatcacatcaacagaaggaaaataacattattgttatgtaaccagctgagcatttcctccgccagcataaatcctttgtcagttctcatggcataggggtgcagatgccggatacagtctttttgcagtgaccgactaaacggggataatttcaggtagcgataaagttcggtcagatgttcccagcgggtttgctctctcgatgcatattcctgccataaatcagctgaagtttcagtcgggaagcaaccctggatacaacgccattgtgaggggcactgcttttgtccggaataaatccaggtccacgcagataacagagtaatacagcaaagcccaggcgattagctggccgtcggtgcttattaatgagagcaacatcctgttcatttaaaaagcacatccgagtcagaatcatttcatcgtctggaataaccagcaagcgttcctgctcttcactgctgagtatttgtctccgtggcataatgcttcctctgcatatagtttattcgagttatcgcttgcgctgaccgaaatcggtcggtttcgtacaccattctgtaaacctgtccgaaagtaagtgaaattcgtttcggacagctgctataattcggacatccatttcgtacggaaagtttcctatgtcacgcatttttgcttactgccgcgtatccacacttgagcaaaccactgagatcagcgaagggaaattgaagcggcgggttttgccatcaaaccccagcgactgattgaggagcatatcagtggttcggttgctgccagcgaacgccctggttttatccggctgcttgatcgcatggaaaatggtgatgtgctgattgtcactaagctggaccgtcttgggcgtaatgccatggatatcaggaaaacggttgagcagttggctacatcagatattcgtgttcactgcctggcgctcggaggtgttgatctgactagcgctgccgggagaatgaccatgcaggttatttccgccgtagcggaatttgaacggatttgcttcttgagcgtacacactctggtattgcacgagctaaagcatcaggaaaacgttttggccgtccatcagcgctgagcgaagatcaaaagcgggctgcgatggaacgcctaaatgcgggaagcagtgtcagcgccgttgcccgtgaatttaacaccacccggcaaaccattctcagggtgaaagcggcattcagaacctgagaatggagtttcaccgattacctgagccgcttacctgactcgtcggtgactctttcaccatcttctttcgtaaatgcgcctttttgtggctcaggaagaatatccagtaccacttcagaaggtcggcacagtcgcgtccccaggggactcaccacaacaggacggttgatcagtatcggatgctgaagcataaagccgagcaactgctcgtcagtaaacttatcgtcggcaaggcccagttgctcgtatggctctacgttgttacgcagcagcgcacgtactgtcattcccatatcggcaatgagttttaccagctcatcatgtgagggcggggtctcaagataatgaataatcgtcggttctgtgccgctgttacggatcatctccagggtattgcgcgacgtgccacaggccggattgtgatagatggttatattgctcatttcagtatctcattacaaagtgacggaaagccgcaacgccagagcggccagagtgacaaacagcacgggcagcgtcatgataatgcccgtgcggaagtaataaccccatgtgatggtcatatttttctgggacagcacgtgcaaccacaacaaggttgccagactcccgatgggggtgatttgggtcccaaatcgcacccaataacgttggcgtagatcatcgcttctttgatggcaccggatgccgtacttccgtcaatcgataatgcgccaatcaacactgtgggcatgttgttcatgaccgacgacaggaacgccgtcaggaagcccgtaccaaaggttgctggccataatcccttttctgccagcacattcagcaccccggagagatattctgtcagtccagcgttgcgaagaccgtaaaccaccaggtacattccgagggagaagataacgatttgccacggtgcgccacgtaagactttcccggtgttaatggcatgaccttttttcgctacggcaaacagaactcccgccctgtagcggcgatcgcactgacggggatgcccagcggctcaagcagaaagaaccccacgagtaacaacacaaggactatccagccagccttaaacgttgccgggtcctttattgcgctggcaggttcttttaaccgtgacacgtcatatgtcgctggaatatccctgcgaaagaaaagatgcagcatacccagcgtggcggcgatggcggcgatatccacgggatcatgacagaagcatactctgtaaagcccagcctgaaaaaatcggcagagacgatattcaccagattggacacaataagcggcaaactggccgtatcggcaataaacccggcggccatcacaaaggcaagcgtagtccctttactgaagcccagcgcgagcaacatggcaatcactatcggggtcagaatgagcgcagcgccatcgttggcgaataacgcagcgacagcggcaccaagcagcactatccaggtgaacagcaagcgtccgcgaccattgccccagcgagatacatgcagtgcagcccattcgaaaaaacctgattcatcgagcagcaggctgatgatgatcacggcgataaacgtcgccgtcgcattccagacaatattccagaccaccgggatgtcaccaggatgaatgacaccgaaaatcagtgccagcaccgcgccaatacccgcgctccagccgatacttagtcctctgggttgccagataaccaggaccagtgtcagtaaaaaatacttcctgccagtaacatttcagaccccattacatatgattcaaagtatgtgtatacgtgtcacttaacaggatgacgacgtggattctgccagccattccccgacatcctcccgcaggcataaccaggacgtagtgatggtttcagcggcccaggcaggtatatgtggggatagtcgatagtggatccatttcccttcccgacggtcaataaccagccctgattcacgtagtatcgccatgtgccgggatattttaggctgcgactgcgcggtggctgcgcagatatcacagacgcacaactcgccagactccctgagaagcataatgatagccagccgggtttcatccgacagaattttgaaaagctgaacaggttgtagcatttttcttcctgattaacttagaatacacatatgataaagcatatgtattatttttagaaccaccgatcattaaaggagaaagaaaaatggagcaatttccatcactgaatagcgaatgctttgataaacagattgctgaacggctggcgatgcaggagccgccacgtatcctgatcctttatggttcagtgagagaacgctcatacagccgttttgcagctgaagaagctggccgcttactgacgtcaatgggcgcagaagtcagagtgtataacccttcgggtttacctttgcctgatgatgctccggaaacacacccgaaagtcgtggagttacgcgaactggtgagatggtgtgacggaatggtctggagttctccggaaaggcatggcgcgatgagttctgtaatgaaagctcagattgactggatcccgttatctgaaggagcagtacgccctctcaggggaaaacactggcagttatgcaggtttgtgggggttcgcagtcgtttaacgcagtcaatcagatgcggatcctcggacggtggatgcgaatgttcaccattcccaaccagtcatcagtggcaaaagcctggcaggaattcgacgagaacgggcgcatgaaaccatcttcctggtatgatcgcatcgtcgatgtcgccgaagaactgttcaaaataacgctgttactgaaagggcataaggattatctggccgacagatacagtgaacgaaaagagagtcacgaggaattgtctacgcgggttaatcaggaaaaaatctgaatattttgtgatgtctgctttgcggtagtaggaacgccatcgaaatcaggcatcaccacactcgttgtatgaaaaacatccttagcgtgggatattttccgttttccaagcggaccccataatgactattcctttcaaccattaatgctcccaataggagccatatgcatttcatcaccgtttctcgaaaccgctttcgtccttatcggggtaggttggaatatagcttttgagttatcgcatttaggttatctctgtagttataaataccgccgaaagtcttatatcgtgtcattacccttcccccaacgatttgatcattaaatcatgatttcattcttttcgacattactgagaaatgatgtataattaaatcatgatttcattatataggtatttcatgaaatcatgatcaaaaaatccattattttacataaagttagatgtttatacgttctataatcgttaataattcaagtaatgaaataatgaaaaggtgaaatcatgattatttcttgtgtgggtcaaaaagggggcgggtccaaaagcactcatgcacgcacgctctatgttgggttcacagatgcaggatggaagacgcatttagctgatattgacgagaagcaacaaacctcacttaagtgggcccagcgtcgagaacaggccaatttaggcgcggtggattgtgctctgtatcgcagagtagatacagccgtaaagatggcagacaagttcgacttgctcatcattgacggtcgcccagcggcagagacaacctctctcgatgtagcggagaattctgatttggtcctcatatcaacgggtacttcaattgatgaccttgagccatctcttgagcttgctcgcgaattgattaaaaaaggtatctccagagataaaatcgtctttagtgtagctaaatcaccaagtgatagtgaaggtcgtaaagcaaaggcaacaattgaggagtggaattttgccgtgcttgatacggtcatcccgttcaaatcaggatatagcagtgcactcgattctggccgagccttgtttgaaacgccgtttaaaacgctaaatgaagtagctaaaaagatggtagaagaaattcatgatatcattaattaatgttatcatgatttcatgaaataatattttctggagtgtaaccatggaaaaacctaagagaagtatttctaagctggcaccaccggcagacaatgagccaactttaaatgtaacaggtaagggtgcagaacccgatttcgcaactaaacctattcaactcaaagtccctataagcaaacacaaagaaatgaaatcgtatgcggctgaacaggggatcacgatgcgcgaaatgttgttggaagggtatgagttgctgaaatcaaaaagaggatgatttcatgaaatcactttttaattaaatcatgatttagcgtgtgttttcctcattgttattgacgacaagtgggaggaagtgcggcaactcacaaagtgagttagtgccaccagaaaggtggcccaggctccgccgcgataacccagacttctacctaaactctagtagtgaataaaagtcgacatgtaagagtcgacttttttgtttctatctttgccatgcaagctttcacagcatatcttccgcgatctctgcaccttagttcgtgagtgaaaatgatggcttgatcaaatgttgatctcattcgtatactgtatatatttacagtataaaggccgtcaactatgtctcttacacttatagagctgagctcactttctaatgctgactccatacctttctatgccgaattgatccaggctggattcccgtctcctacacaaggatatgataaacaagagttaaatctccatgactattgtgtaaaacacccatctgcgacttatcttttgagagtttcagggcggtctatggaggacgcaagaatacacgatggagatgtattagttgtggaccgatctcttacgcctgagcatggaagcatcgtcattgcctcattggacaacgagttcacagtaaaacgactggtattaaggccaaggccgtgcctaatgcccatgaaccctgcctacagcccaatttactttgatcccgaggagaaccaacttgagatttggggtgtcgttacatttacggttatgagtcatttgctatgtacggaataattgacgtcaatgggatgtttgccagctgcgaacaagctttcaggccagacctggtgaacagagctgttgcagtcttaagttcgaacgacggtaacatcattgcaaggaatcggctctgcaagttagccggtataaaaatgggcgacccttacttcaaggtaagacccctaattgagaaacacaatgtggctgtctttagttcaaatttcacgttgtacggatctatgtccgcgcggtttgcctctgtcgtagaatcattatcagccaatacagaatgttacagtgtggacgaagtttttttcactgctgataatattgaaaaggtcatgagcctggatgaatatggccatcaactgcgaaatgcagttaaattacacacaaccttagtgtgtggagttggcatatcgtattcaaaaactttagcaaaattatgcaattacgctgcgaagacatggcctgcatacggtggagttgttgcattaacagaccggcaaagaattaaaaaacttctaagcattgttgatgtttcagaagtatggggtgtgggtcgaaagatcgcaaaaacactctctttaatgggaattcatactgcgctcgacctggcccaggcagacacaaatttcatcagaaagaatttcaacgtcgttctcgagcggacagtaagggaactgcgtggagagtcatgctttgcgttacaggaacatcctgtgactaagcagcaaattgtcgtatctcgttcgtttgggcagcgagtgacgtcgttagatgaaatgcagcaggcagttacaggctatgccgcacaggcagctgaaagactgcgtgggagaatcagtattgcaaggctatcaatgtatttgttcggacaagtccattctcgataaatgacgttcagtatggaaatcaagccaccgagaagctgttgacgcctactcaggataccagagatattattacagctgctcaacgcgcactggcgcggatttggaaggatggaattaattacgctaaagccggtgtgatgcttgccgatttcaacgggcgtgaagctcagttaaacctctttgacgaatcagcgccgagagaagggagtgataaattgatgggattgcttgaccgtatcaacagagatggacggaaacagctattttttgctgggcagggtattaatcctagttttaaggtgcgacgagattggctatcgcccgaatacacaacaaattggaaggacataccaagagcaaaaataggatagtctcatgctttcatgctttcatgctttcatgctttcatgctttcatgctttcatgctttcatgctttcatgcattgtgaaatcatgcattaaaaggacacaaatagtgtaatgcatcaacacttgagtggccgagctccggtttacatatgcaatcttacgctccctcgctcactaactcgcattgctcggtcgttcgactgcggtgagcgttagctgtagataggttacggcgtcacttcaaatttaggctcactctttagctaattataatccccgaccttataaccgctcatatcaatgcctttatgttctcatttttgttcaaaaataactcgcgaaagctagtttttaagtaaattatgttgtaaatgggcgtattttgctttaaggttactcttatgttctcggtatagagtgttatttgagaatttaaattctcaaatgagcaaacactaagagaacgtttattctcaaatctggatttactagcgagggcactatgcgcatttttattgatgacggttctacaaatattaaaatgatgtggaaaggcgaggacggtaaagctctacgccatatgagcccaaatagcttcatcacaggttggagtgtcgcgttcgggaacagtgacgcggcaaactatgagatgggcgaacgtaaatttagctttaactcaaacagtgcaaaatgcatccgcactactgaggttgaataccagtacagtgacgttaatgtaatcgcaattcatcatgctttacacacatccggcattgaaccccagcccgtagagatagtggtaactttaccattatcagaatattacgatgcggatatgcaggcaaatagggtgaatattgatcgcaagataactagcgtaacccgcgctgtagctcgtaataaagaacaagcgttcacaattacgtcagtgactgtacgccctgagtcgatgccagcaggcttcaaagatgctcaggttctgaagcctaaccaatcattactaatcatcgatattggcggcacgacaacagacgtttcacaggttttaggtcaaatgaatgggattgttcagatcgagtttctgacaaacgttggcgtttcaatcgtaacctcggttgttaaagcggcgttggcaaaagcaaatactgaagcctcggattatataatcaatgaaatgatcaagaatcgtcatgacagggagtttattgacggctgtattaatgacgcaagtcaggtagataacgtaatcaaagagattcaaagtggtatcaatcaattatccgaacaggtgatggaggtagtaagacgtttccacggttatactgccgttactgttgctggcggtggggctatgatttgtggtcaaaatatcaagtcatccactaatattagagacgagcgatttaatatttctaatgacccgcaatatgacgttgtacagggcctttacgatattgatatagggtgataaatggataacagaagaaaagttactttctatctgaatcctgacaaaaatgtcgcagacaagcgtgtctgcgattatttggaaggggttccacttaagcaacgcggtgagtttagccgaaatgctctttttgctggatatcttattgctcaaatggatgagagaattataaaagcagtgaacctattggcatcagaaaatagcgactttatggacatgcttaaaataattcaggatgttgtgccaaactttgaatcgaatactttgaatgtatctcgagttggaagaaatgacacaagtaatctgttagaaaattccccaggtgctggccaacaacattcattgacaaagcaaaatgtttccacaagtgaagacgtaacaaggaaaaacgccaaaaaattattctgatttttattggaggcaaaatgggcgatttaaaaagaaaatggaattatttattagatagcttggtccctacaggttctaatgaaaaaaaatcaggaaggttggttcatcgtttatgctagtaagcgcggtgtttatactgccgcttttgctctttaatccaccaatttgggtaaaggttgttctacagttactctatgtcttatgccttattattggggcttgtgtcatgaaaaagcttgagagccggtgaaaaaaatatagatttttttgggcgcatgaaatgtatatgatgtttctaacatgtctcaataaggaaacagaatgagtgcgccgtcaataagtgaagtgaaacggataagacacaagcttaatctaacacagtcccaaatggctcagctcctaggtataaccctccgtgcctatcagaagcgtgaagatgtcatgaaaacacgcaaaactgaatttgaaatgctccaactccttgcaggagaacatgatctctatgtagtgtcttcaaaagacccttcaaagtcacctattgagggctgggtcatggatgattcgacacatgaggaacttagggcaatacgtgagattttaggtctgaccatcgctcagatggcagaactgacgggttatgccagatccggatggaatacaaaggaactgcctgatcaaggcactactgtgcgcccaggtgagtataactatctaatgctattagctaataaacaccctaatctctatatttatgatcgagaataaatctgggaaatacgaagggtacatgagtataggagttatctatcattccacgatatatagtcatgtatttttcgtgaagtaaggctagatgaatatctggacataataaaatgcatcgttcaacagtatgtttataaaccccatacaccaagaaccttaaaatctaaatttatcaatataatccgttaaaaatttcaaaataatcgtgtgttaaaataaacaccttgcatgatgtcgtaaatgggcgtattattcgtttaaggaaacgaatttgttttcttatttcccggaaggggttatgccggtttcggctgtattaaggagttagtcatgcatgctatgcaacaagaacttttttctgaacctgtaaaatcatctaactttattccaggtaataccggccaattacgtaaagaattttgttcattattgagtgatatatctcgccagaacggtactcgtattttcgatgtgtttcgtgacttcatttctctcgcagctagagagttagatgctgtccgaatcagaacggataaaaacattaaggagtcaaaagtaatttgtgataaatatactgctagtgatattgattcatttcatcggctttttattatcatggtagaggcacttaatactgagttccacgattttctaggaatggtgttcatggaactggatttcggtaatgattttagggggcagttttttactccggaccatctttcaaataccttggccagtttattgatagggaatgagtttgatgcgttagtcaaaaaacccattatcacactcggggaacctgcatgtggcgctggcggtatggtgattgcctttgccaagcagcttatagagtgcagggtgaatatatcccaacgattgttcgtcagttgcattgatattgatcccgttgctacagatatgtgttttgtgcagctttctttacttggaattagtgcggaagtgacgacaggtaatacattgtctatgcaattgggtctaagcagaaaaacacctgtttattttgctgaaaactgggaagaaaaactgaggtttaaagacctcttcgaaagcatgtcgaaagcatgcacaacactgtttcaataaaacatcaacggggaaggctaccttccccccattacgccggtttcggctcaaacaggagtatttatgaaccagtttaaacacttaagtgacgaagagttgtatctgacgttgttatcgatggagaaagccgcagtgccaggcactgataacgtgattgaaatgcttcaggctgagatcactgcacgcgaatccggccaggaaaacacctttcatatttcagaatgccccccgctttatgaatcgacacgagcaaagggtgagttgcctgcgcctaatctaacgtgtcagtggaaccctatcacggccagaaaatgtcatgcgtggctattgagcaatgaaaaggtcttacacgttactattcaggctaatgtattcttagatttgtccccagagtcgccaataggctttcagtactgtgagttggaaatctatcgtaatgccgcataccttaaggttgtaggaaaaagtggtttcgtcgaccaatatgatctgacctcggacatgttcagtcacgggaaaattttatgacggccaacgcatcagtaatttcagccggcagtgaccacataacgtcagttagcgatagatgtgattcactcgttttatccggtactgcgttagaacaaggacgctttcatgaaggtgtttcacaacatttggagcgtatatgcgataactatgtggaacgaaacatgacacgaagaggtgtagtggaccgtctgttgaaatgcgggtttttgccagagatggaaatcttcgagcagaaggtttatcagtatcgcctggtgcacgctgatcagcgttacattgacattaccgcaacaatgtatgtgtatgcgctgaagcaatattagactgacttgatgcatataatccggaggtgatacctccggaattctgccggattcggcttgttatgaggaaaaaaattatgattacaactgttcaatctgcacatcagaaggcttatgcagccttgattcataatgctcagtctttcatggatgcctacgtactggaaaccggcatttgtttagaaatgatatctcactcttctggcttgataacaattggtcctgatacaagttgtacgctccttactgtagttggccaggttacaataactgcaaaacaatgccgtatactatgctcgctatatgcctattcttcgttagtacagtctgcatgggaaagcgggcactacaacctgcatcgtgagtgcatgacaacgtgtgaaagtctaagtgcgctggccgattatgagttaaatctgctatattctcagctctacaatggagctgacgcagatatgtttgactataaaacccatgaccaagagcgctttggcgataatgtggtctatcaccataagtttaaacgcggaaatcatcgttacgatacctacgtgtttttaaaagatggattttatgcagcagtgtatcggcaatcctattcaaagaaaattgaaggtgtaaaaaagtcatttataaatgatgaaaaaatagttggtccgtttgaaaaagttgacttcattaatgctgaatttcctgagcatgtagaaactgataaacttaaaaaatcggatttcttcaagggattgaagtctgatatgcatctataatctgatgaggtatattctctcgagttattttgattttttttatttcttcaaaaagagttgcttatgatgaggtaattaaatttacttttgaaaccggctttgttgaataaatcgaacttttggccgtagtcaggatcagatcaccacactcctgtcctgcagcgatatcacgtgacaaaacaaaagttcaaaatcaccaactgggctacctacaataaggcgctcatccatcggggttcactgacattctggcttgatgagtcggccattcaggcttggtatgacaagcccagcacgtcttcacgtggtcgtcctcacgttattctgagctcgctatttctaccgtactgatgctcaaacgtgtttttagcctcacgctgcgcgccgcacagggatttattgactctatttttaccctgatgaagctcctactccgttgcccggattactcctgcgtcagcaggcgggctaagtccgtcaacatcccgtttaacccccacgcgcggcgaaattgcccatttggttatcgactgcaccggattaaaagtcttcagtgaaggggagtggatggtgaaaaagcacggtcaggaaaaacgccgcgtctggcggaaactgcacctggccgtggacgccggtacccacgaggttatctgcgctgacctgtccctgaataatgtgactgatgcagaggcattcccgggacttattcgtcagacccaccggaaagttaaggtcgcttctgccgatggcgcgtatgacacaaaactttgccatgacgagctgcggcgaaaaaaaatcaaggcgcttatccctccgcgagctcgggcgggttactggccggcggagtatgcggacagaaatcaggcggtggccaggcagaggcttaccgggagcaatgcttactggaaatggcacacggcttataaccggcggtcggtggccgaaacggcgatgtaccggattaaacaactgttcggtgggcacctgacgctgcgtgactacgatgcacaggttggagaagctatggccatgatccgcgccttaaacaaaatgacgcgagcagggaggccagagagtttacggattgcctgaggaagtcagtgacgagaggcgcttttatctaaatccgacttattcaacaaagccggttagggcgtaaaaacgccctgagcgcgtttgagcggtgcgcaaataggcagttatgttatatttcaataaaataaccgttgctaataagaaactataaacaaggtaaaatatgtgtataaataaaagctcactatatctagtcccacttatctttttgtgtaatttttcttatgctgcatcattcgattgcagtaaagctaaaagctttgttgaaatgagtgtttgtacaaccccgaacctttcttctttagatgataagctgaatattttgtataaaaaggctagttctataaaaccagatgaagcagttttgataaaaaaaacacaattattttggttgaaaaacattaggaacaaagcgagcacatcctcagaaattgagtcagcttatgaatctagaattaatgatttaaatatgatcgttaatggtgcatcacaacccgctcaggcatcacatccggctcaggcatcacaacccgctcaggcatcacagccggctcaggcatcacaacccgctcaggcatcacaacccgctcaggcatcacaacccgctcaggcatcacaacccgctcaggcatcacagcccgctcaagcacaaaaaccatacattgacggaagtgaaagaaatcaagaagcagtagatgtactaactaaaaaatattcgatgcggggtattttttaccctttaatagttcaagcatgaatgtggcatatggcaaatttttatcgaatatgaataatgctcacttttttattgataaaacaaagtctggcatctatttagaggggaatgttgcctatgtctctatgttaaatgagaaaaatttccttcttgttattacagatagcaatacccatgaaataaattatattgcatcttcttataatgataacagcagcctgtcggcttttcttaccgagttgattagtactttaggtgctggaggtgactatgaacttccagttacggagttgttgaataacgtacaagaagggagggatgcagatgtcgttattgcagggaatagatatcaagttgaagctagaggtgaagtagcttttatatctgtggaaaggcagcgttaaatatacggtcatgttaaatgcctaccgcgccctctggggcttgctcaaccccaaaaaacgccccttccaggctaacgcttggaagcgtcatttttcggcgtttccaacggggatcgagccgatcactatcgaaaaccgtttgaaaattaacccttttttctattttttcttgtgattcatcttcaaagggcgtaaaacgaaaaaacccaccgtaaaggtgggctgttcgggaaattgaagctaccaacttcaatttgccgtttggtaaaaggtttctgacaccgattaccgtggtaatgcctagaatagtaagcagttaccgagttgttttagtttaacacggctttgttgaataaatcgaacttttggccgtagtcaggatcagatcaccacactcctgtcctgcagcgatatcacgtgacaaaacaaaagttcaaaatcaccaactgggctacctacaataaggcgctcatccatcggggttcactgacattctggcttgatgagtcggccattcaggcttggtatgacaagcccagcacgtcttcacgtggtcgtcctcaacgttattctgagctcgctatttctaccgtactgatgcccaaacgtgtttttagcctcacgctgcgcgccgcacagggatttattgactctatttttaccctgatgaagctcctactccgttgcccggattactcctgcgtcagcaggcgggctaagtccgtcaacatcccgtttaacccccacgcgcggcgaaattgcccatttggttatcgactgcaccggattaaaagtcttcagtgaaggggagtggatggtgaaaaagcacggtcaggaaaaacgccgcgtctggcggaaactgcacctggccgtggacgccggtacccacgaggttatctgcgctgacctgtccctgaataatgtgactgatgcagaggcattcccgggacttattcgtcagacccaccggaaagttaaggtcgcttctgacacaaaactttgccatgacgagctgcggcgaaaaaaaatcaaggcgcttatccctccgcgagctcggcgggttactggccggcggagtatgcggacagaaatcaggcggtggccaggcagaggcttaccgggagcaatgcttactggaaatggcacacggcttataaccggcggtcggtggccgaaacggcgatgtaccggattaaacaactgttcggtgggcacctgacgctgcgtgactacgatgcacaggttggagaagctatggccatgatccgcgccttaaacaaaatgacgcgagcagggaggccagagagtttacggattgcctgaggaagtcagtgacgagaggcgcttttatctaaatccgacttattcaacaaagccctataaaaaataacaagcgaagcgcgttaggcgttgtttttctttttcatttttcaacagactaaatacagtgatcttatatagatctttcttttcttttcctttcttttcttagttcgtaaaactaactaaaacagcaagttatcattattcatgacgacatatttatgatcctttgacgatgaatttaagactgagtaatgacagatttatgattggatgacgacaaatttatgagttgctgctgacacatttatacgtgtcatgacgacaaatttatgaatttatgacgccgaatttatgaattaatgacgacaaatatatgtggataactccgatgttactggaatgggcgctatcagtatttcacgaataacattgtttctttgaaagcatattacggattgctaaagcacttaggtgacagggtggccgcgccgaccggcagggtatgacgacaaatttatacagtccggccagcaatgccggtgacagggtggccgcgccgcgccgaccggcagggtatgacgacaaatttatacagtcaggccagcgacgccggtgacagggtggccgcgccgcgccgaccggcaggatatgacgacaaatttatacagtcaggccagcaatgccggtgacagggtggccgcgccgcgccgaccggcaggatatgacgacaaatttatacagtcaggccagcaatgccggtgacagggtggccgcgccgcgccgaccggcaggatatgacgacaaatttatacagtcaggcagcaatgccggtgacagggtggccgcgccgcgccgaccgggaggatatgacgacaaatttatacagtctggccagcaatgccggtgacagggtggccgcgccgcgccgaccgggaggatatgacgacaaatttatacagtcaggccagcaatgccggtgacagggtggccgccgcgccgaccgggaggatatgacgacaaatttatacagtccggccagcaatgccggtgacagggtggccgcgccgaccggcaggatatgacgacaaatttatacagtccggccagcgacgccggtgacagggtggccgcgccgcgccgaccggcaggatatgacgacaaatttatacagtcaggccagcaatgccggtgacagggtggccgcgccgcgccgaccggcaggatatgacgacaaatttatacagtcaggccagcaatgccggtgacagggtggccgcgccgaccgggaggatatgacgacaaatttatacagtctggccagcaatgccggtgacagggtggccgcgccgcgccgaccggcaggatatgacgacaaatttatacagtccggccagcaatgccggtgacagggtagccgcgccgtggcaactgtaggattatcaaaactttgaattgaatcaaaaatgacgacaatttattattgtgtcgtcattgatggttgtttagtatgaggaatctttatatgcagggtttttttatggataagcgtgaaaggttagttactcaagcaaatcaacttattgaaggggcatacgaagtcaatttaacagagatcagacttctctacctcgctttgaccaagattgatccccgccgtgagcaaccggaaagtgagtacatcatctacccttcagaattcaacgacatgtactcgttaggtagaattggctatacgcagctcaaacaggctgtgagtgggttagcgcgaaaacccatcataacctacgaaagtgataatactacagtcgaaaggttctggttctcgtcaatcaaatacacgacaactggtgaaggttttatcgttgttaaattttcggattcggtaagagaagcgctttacgaacttcgccaggaattcactcagatgaatttaaacgagctcgtaaagctagatacccagtttgcctttcgtctctactcttggttataccgctatcgtagacttgataaatacacaaacagtcaaagggttataacgactgaaccttttggtatcgaatggatgaaagagcgcgttggtctgactggaaaatacccaaaattgaccgattttcgcaatcgtgttctggaccctgcaattgacatgatcaatgcacacacgaacttaagtgtaagttatgaaatggagaaaaagggtaaacaagtcaggtcatttgttttcagctatatcgatgaaaaagaacataacgtcaaggcattagcacctgtaaaaccgttacgccctcgattgcctaaccgacctcgagtcacaagcggtagcgcggctgagggtgaatgggcaagacaatgcataactgtgatgaagaacttccaaaccgccttaaaagcctatgatccaaaacttcgcattaatacagccgacaggaagaaagttgaagcatggtactcaattataggattacagatggatgggatttttaatcgtgaatagtactcagaaagattgaagcccacgtctcggcaaagtcgtgggcttcgggttctgcaaaggagcagagatattacagaacggattataggttaatagcatggcgattcaaacactgctattgaccttcattttattctcttcaatccctcgctattaattctaattatgtccatgttttgtcaatgttgtgttgtcaaaatatggacattttggcgtgggatgttatactttgctcatcagttagcaatttcgttaactgccttggaaccagcggcggcaaccgctccaaggaactgcaaaggacaaatacatgaaatgttatgagcgttctagagctgataccgaaatcccttctgaattcgcaatcatggctatcgtcggtccagaatccaaaatggatgacattgctacattattgacaaaagcgggcttcttttgtaccggtcgagaacttgccgagaaagatgaagagcgtgagctgtattttatcgtgcctcgctgggaaataggtgcgttccgcaagcagtggaaagctgttaaggcgggtttatgaaagcgacatctacaaccattatcaactccaaaattggcgcgtctaaagggcacttgcgcatctggctcgagggcggaaaactctctcgctgtggttattcgcccgatgaccgctataacattcatatctcgggtggcaaaattgagcttactcgtgaagaacacggaaattttgcggtatcacgccgcaataagggcgggcggacttacccactgattgagataaccagtgctcgttgtggagatttatcaaatattttctctcatgaacagcagatcaggattgttgttaccacgcacaaaatcgtgatcaccaaacatcatatcgatacacagatacaagaacgagaaaaccgcttacttacaaaactggctacaggtgctgcactcgataccggctcactatttttcggcttcggcatgcttgactgtgcggctcacgacggcttggaagaagccggtattcgcactcagttgagtgttatcgtagaacgcgaagcaaaatacctcgaccccgcattagaaaaaaatgcacacatgcttagttcggcgcattacatcatcgagtcaccaatacaggctgcgcgtattactgacagacaacccgttgaccttcttattgcaggtattccctgcacgggcgcaagtaaatcaggcaaggcaaaaaacaaaaataaaaccgctgaggaacatccggatgcaggcgcaatgttttactacacattgcgttgcatcgaattgttgaatccagcacttatcactctcgaaaacgtcacagaatatgctaatacggaaagcatggccgtgatccgctctgttctggacaacatgggctacgatgtcgtagaaatgactttatctggcgttgattttggcagtattgaggacagaaagcggttgtgtgtttttggtgtctcaaagaaccttgatttcaagatctttccgatggaagaaatgattggtcatagaatgaatcggtcaatgaaagcagaagtgttgtccgatattcttgaggatattcctctcgactcaccggcttggaaaaactacgactatctggcagaaaaagagataagggacatcgaggcaggtaaaggttttcggcgccagttgctcgacgggaatgaagaaacgtgtgggactattggacgtcattacaataaaggccgttctactgagccatttattaaacatccgaccgatcccactaaatcacgtctgcttacggtaaaagagcacgctgcggtgaaaggttaccctttatcaaaactgaatcctgagatgtctgtgaccacggcacacgaagcattagggcaaggggttatctatcctgctttcagggcggctttccgagtattaggagatttcctttctcaatatttgaaagcagactcgatagagatagctgcttaaaatgtaatctaatttgcgggtttttgagagcccgtgggttagattttgattttaataggacatgttcgatgcaatgtacaggactgttacttacaatgccgaagaattacaaagtgagcctgatagtttcctcttaattattaatttagttgctaactttcagcctgattgaaaatcagggttggatcatgaaaaattggacatgagaagatacccaacaagataattatttatgttgtgatgctaaataagaacagtaaatccgatggtaaggagggatagatttaagtattgtgcatcccgcttttgttgctgtttttgtctatgcattgttgcaataaccatagcatgtttcgtacagaaaaatttttatatgcccatcatcctataaagatatttttgctgagtttttgtaggctgatttctgcactcatgcggtgactattcgatattataattatgagatacgatgttatatggcaacagtaaccctgttttttcatgaattttaagggaatttaatggatagaacgcgtattaccccttctgactgggaaagagctttacctgcattcgaaagccttactcaggcaaccgttaacacggcatatgctgttttagttgagggtcgccgagctgccgatgtggcgcgtgaaaggaaaaagacaaggcaagcagtcagcggagcggttgcccgcgttttagagatcctgaaggtcttcgaccttcaggaacttgaaccagtctctgtctggttgcctcctgaccttgcggctgaagtacgtaaaatggcagaaccatatatgcctaaaatcacacactaaatggacgtaatgatgaacgataaagggaaaatctgttctgatgagaactatcgcgaaagcggctatacgcagggacaactaggtgaaaataacggtgatactctcaaagccgagatagcagacctaaatggacgggaattttataatcttgatgctcgtcagttacttatttaccggttatgccgtgatcagggttggaagtttggtgttagtcttgaggtcgatactgatgctgacctttctcggattgaagaaacgccagataaaggggagaaactgcttcgcgattctaacactaagctcgttattagatttgaagcataatcagaaagttatcccatagattttttatctttcaaaagattttaaagataaggccaaagaaagggctaacagcatggccccttcggctccgaccggaggtcgtcgtctgcccattcagctagacgataaatcgccaagcttcacgaaatcccgtatgcgggttttcggccttccggctagggtcatatggctaagaccaaccaccaagcgtcacttcctggcaagccagggccgcaaaggtcgccggtctctcgctctgctcgatttaccgtcgtcaatgttccatttgcaattcctttgctcattgtttctatggtatcaccgcccgcttaaattacaccgtctggtatgggaacaatagttcgcaagctcgtcatcgaaattctttggggtcgacaaaacgccccaaacaatgtctcaccgctattgcacccatactgatcagacagtgtaactacgcttatcggcggcgaaactcaaagaaacaataataaacagcggaagaattcaaatgtcacttacgaaattcaacagcggcaacgagcctaaagaaacaaatttaaaaacagataaagttttaaagttaattgaccatttgtattgaagggcgtgcgaagaactaaggaaaatatataaggaaggtagcggggtttaaaaggattagtgtattttaatctgtttttattggaatatttataactaccgaatataaattttgtacttacggtcgaggtgatattatttcttaaaattctaaagcatacggttaggaaatatattgcaaaaaaaataaacctgaattagatctagaagatatgtcacattcgttagattgtagtgttaaggaggttattttttcgccgctggttacgggagatactcaatatgaaaaaacgaataggttttaagataggtacttaaaatgcttttcatgtgccctttttgggagcgttgcttccctttttggttgtttatggtcccctttacggttataattacttcgtccctaaaatttcgggtgtagagatgataaagaacttcaaggacggcgaaaccggcgatttatgccgattctataaagataatcaacgtggtgcatctatacctgcactgctcgaaggggcactaagacgaaagcttgtcatgattgaagcagcgagcgaagaaagggctcttttcacccctcgtagcaataattatgagaggctgtccggtaatctggaaggctggtcaagcataagagttaacatacagtaccggataatttttcaatggcgtgaaggtgccgcacatgacgtttatctggatgctcatacatataggtgatctatggacacaagaaccgctgaacccacctccgttggtgaaattattcttgaagaatttttaaagccaatggactacacgcaggcgcagcttgcaaaggcgttgaatatatcgccaaaagttttgcgccagattatccacggaacccgtcgcgttagcgttgaagaggctacagaactggccgcgctgtttgagatgccggaggatttctttataaacgtacaggcgcagcatgatcgctgggaagcgagaatgctcactgcacagcatcactatcgcccgattaacatggtactggccgtcagttaaattcactgcggggtacatcccgcagtctttatatattgagcatatactggagtgccctcgataccttagtttggctgtccattaacagcaacgtcacatactcgcctcaactgcccctgtctcgtacttgacctaaaacacaacttgcttgaacaaacacagtttgcgcagcgcttaacgctctcaatcaatattataaatcatgcctcagctaactattttaataatctcttatattagagtgatataagttgataaatgacgtatatgggcgtattattgctttcatggaaggcgcaatacctttcgtgttcccgtaagggttatgccggtttcggcgaagtatgaggattaaaaatgttcaatcaagataactgcccgagcatctatgtgggtacttacagcaaatacaacaacggttcagttgccggagcttggatggagttgaataatttcgactcaaaagacgagttcatttcatgctgcattaagctgcatggcgatgaaaaagatccggagtttatgtttcaggattgggaacacatcccttcgaagtttgtaagcgagtctagtctggattgggcatacatcgaagcttacaaagaggcccgcaaagcggggtgtttagaggcgtttaaagcttacgcagactattttaattgcagtgattatgaagctttccaaggttgttatcacagtgaatctgattcagagatcgattttgcaacttcttatattaccgatactggcttgttagagggttgccctgagcaggtcgcaaattatttcgattacgaatctttcgccagagacttatttattgactcgtttgtcctgattgatgggtttgttttttccatctaatagtttcctcccctttttaagggggcttttttattaaggtaggaggaagcaatattacagacgatttaaacagaggcgcaggccgagttaggaaaaaagtcagggcgaaatgcttggccagggacagcagaggcgcttacgcgcctcagatattcttgtcctagcctgtaaatagaagtggctatttattactgtcgtttaaagtattgctggactggcaaatcttaaatgtcgccggaataggggcagggtcaattacgagggcgagtccctaaagggaccggagccactctttactgagccagcaagctgtctcagccctgcggggagtgtctctctcgcaactactaagcagattataagtataaaaaacttcgtaggtgttttgaggagtatttcatgttggcttatgcttgaataacctactctgtgaaaagaaatttggatgttttagaatatggatatttcaattaataatatatgatattctttgaaggaaaaaacagtttacaaaaaaatggttactaaagtaattagagctctaagcacagttattggttgcttgttacttgttagttagtagtgcatctctctcggcctattagggtatgtattacttggaaaaaatacatgtgaacagcaccagctagtatgtatatacatcgtttgttctttattattaactgccatttaattctctataatctgtacatataaaattgttgatatttattcttaggggcaaagaaaaattattataaattgagtattgctagtgataactattttcagtttacagggggttgactaaatattaatgattaagtgaagatgaaacatctctatctaaaattgaatttttgtgcttagttttttcatttaagtcgagaggtgttaaagaattgatagagggggaggggctacatgaaactgtttagttagttgtaaataacattgaatgcaagttgataaaatatttataaaataaacaaagaaatcacatgttatcttttattggccaatgcattttcgctttgagtagaggttaacattttgttctctatatctctcttggtaacaagaacagtataaattgacctaacatcatcgctgtagtttttacgtattttcaaaagttgcggagtatttcttgggccggtgttatacatacctaccgaattccagtttcgaccataatccttgaagttacgagcaagaacccacgcaccagtataaatacaagtgcaaggctctttggttaaattgactggattaataccgaactctgctagcctcttttggtgagactgattgatttgcatttggcagtaatcatttgatttatgatttatcgcattattattaagtcgtgattctttaatgccaatagcaaccaggagaagagggtcgatatgaaaatcatggcctgctgtaaagtagcattgagagacgtcaacacttgtcttcgcataagaagggatggaggtaataaagcacgcagctaaaaatgcatttttaaacgtattcacgttttcctctacgagttagttaaaatctcaaaagaaggttctatattttcgctgctttccaaacttcctgcggggccactggggcgcgcatttctcgaaagctggaatatcccaataccaaaatagtacatcaaaatataaccgcttgtctagatttaaaatacacacaccctacgcaagattaaaaacttcgtttttatctttcagatacaatagtttagcattgatgataattttttataaagttacagtattcaaaagtgttgtgcatttcatacatatattctacaacatttattgtagatactatgtagaaatgttgtagagtttctacaacattaatgtatactaattaattcatatatatatgtaattttattgacttttctacaagctttctacaatacatggatagctattttatcgtcagcttgtagggtttatcttgaggtgagctatgataaactgggtttattcaagctaataattagtgtgattattatacaaagtgtaggttttatacatacaaaagggtttgaaatatgccatctagaacaacttacttcaatgatgaaaattgggacaaaatccagtcaatattaaacgctaatagtactgagggcagtgaaggagaaaagaatttttctcgtttagtgaatgaaatattgcgcctcggaatttttttatacgaagctcaaggtaaagatgaaacattcagtctagaggcttttcgccgcgaagtattgcgacgttctgtaatggcgagtgaggcgcaagtaatgatttttaatatgttaactgcaatgtatttcaaattaaccaatccaggagatagcgaggcggctattgaggctacgctatctaacttcctaagttccactaatgcagaggcagataaagttgtagctgcgttctttgatgcaaaggatgcggttttagattaaaaggttgtattcagagatttaatatcacttttattttttttaaaagtggctgtattcttaactagttagatttatggatgtggtagcgacatctatgaaagatttggggggaaggtgagatagtagtgaattgtggtttttctatcttgcggttctttcttttcctgtgagggcggtttttacccgccctctatcttattctttttcctggtgactactggtaatagaatcaatgtattcaaccatgttttctttagacattctaacgtatcgttcagaaaggattgtgaagaacctgagtatccggatcttctcttctatttcatgattgtactgaaaaccttcaaatgacttcattaatctatcgttaatttcagcatttatacttctatcgaaaaatttagcactagacttaatgtctgcgatcaaccccttttttaatcgaagtagcgtagacgttgttggtccggcttgttgttcctgagaaatatctaaactatcagtctggaatctagcttccaggtcagcaggtgtttcgccaacatacgttttaaccctctctttagaatattcatgaaatttctctaacgtatcttctacagttaacaactcctctttcgaaaattcccttccaaatcccaggctgtaataagtttcgagtcttgtcattatttcttcgttaatgcttaagcccgttttgcttattgaagaagctatttttcctgaaattatttcaggaactcggtatctcagtggaagcagctctccttcattgtagatcctaggtcttcccttgttcctcttcggcttttggattgtcatgatttacctagctttttgtctgttgtcagaggcctaaattcttattatttgcagcgtgatatggcaaatatcctactgattttaataggtaattatatagctaacgtttttacttaacaattctagccccgctggaggtaggaattttctgttttcaaagaaaaagtgtgatctgcatcacatttttattaataggaccacggtactattaaatccgtgtaaggatttctttacctgtccttaccgaaatcatacttagactgacaattaataacatttaaggattacaacatggtttctaaaatctcttcgcgtaaggaagtggcggtagcgtgggcgcagaaaaaggttttaaacgttaaaaactttttcatgaaaaatcgcaaatcaattatgtctgttggcttagctgcgggtgtagtaattgctcctcagattgcagcagcagctgggaccgacttattaactggccagtctgatactgtaaacggcacctttggtgaaggctcaagcatagagaaatacttctatgttgcggaagtaatcatgtcattgattgcttactttaaagcccgttcaccagttgtgtttatggggctgttgcttgttattgttttcacgcgtatcggtttcagcatcatcgggtcataaaaaatgtctggggaattggataaattcaaattcccagaaaccataaatgagcagacacgcataatcggattacccgtcgatgaaatgttcctcataacaacccctattcttgcagggattggaatgaacatgggcggtcaaatgtgtattgtcgcgtgtctgctatggttactggtgagatatcttaaaaggggaagggcacttactatatggttgatatgttgtactggtatttgccttcctttatattccgcatcttctatagggtcatccccgactctggcaaccgccactggattcgataatgaaatttactgtcaaaaaatcacaggacagaatgatttcaatcgcatttctgtctttattagtccttcttagtctcagtgttcttactaattgcattctaggcggcttcgtttggcgggtgtccagtacccaaaaaacaattacaacgccaatgatgtttgaccaaccattcgtgtcaaatagcgtctcaactgatcagaatgctaacgctatgtttgtaaggtcttttgtaaaccttcgtcttaatgttaccctgaaactatagaccaacaacaacgccttattctgttgtataccttgccggactttagatcttcactaaagaaggctttggatgttgaggcccgctatattaaggataatggtgtttccagcgtatttattattaacgacatctctgtaaatccacaaacaggagagtccattgttcatggtgttcaacgtgcctccacatcgaatggtaaattagttcttaaagacacacctaagacttacattttgaaaattcaatatgaaaatggccttgttaaattgcttgagtttagcgaggtgaataatgaaaagaataacggctaataggagctcatgatgaagcaaataagtaaattagccttgctaggtatcatgatcagttcctccactttggcatatggcgcttatgtgccagggccacaagatattgtgttcggtaatgatgcaaaagtaacggcatctttaagtaacgtcagtccgaacaaaattatcatacctggtgaaaacataactgaagtggatgggccgaacggggcatttgaagattctaaatctgctgacggcggtgtgatgatttcacctactgtcgaccaaacctttacgatatatatccaaaccgataagggctcagcactgtcaattgatgttcatccgcgcagtatgtcaggtaaaacactgaggtttattccgagtgacccgcctgtaacccaaaaagagacaggcaaccactgggaagaaggacagtcttacgagaagacactcattgatgtatctcgttcagtattgaacggcattttaccccaggattacactgagtatcctgtaagtcgcgcgcttccatatatgccaagggtgtctgtcaccctgaccccacaaaagcaatttgttggacctcatcttagggtagttcggtatttgattagaaatgactcgtaccttaccgcgaacctttcagaaaagatgttttggcaacagggggtacgcgcagttatgctttcaacaaataccctctactctggtggtgaaggttatctttacgtgatcttcagttatgaaagtggggtaactgatggcaactaacctgaatgtctcgaccaaaagaaagcaactgtcagtgcttattggcgtcatcatcgtaagtggattggccgtggctgggtttggctactacaaccatgataaaggacataaagcagctactccaccgaagcatgatagtgcgcaagatatgacgggtgttgttacaaatacttttaatcagcagatggaaagttctgcacttacgcagcagcagcaagttacagctgctatacagtcccaactcgataaacttacagtggcaatgagtaaagaccaagagagtaaagacaaaacaattgctttacttactcagcaaatccaagacttgaaaaagtcgggtggcccccaaactgatccccaagctggttcacagcctatgaaccttgggcagggtaagcaagagcaatggaaagtcaatgttgggtctcctacattatctcaaggaactggaaatatcccattgccggcgaaccaaggttacaacccaaatcaaggtacaggtttttatcctggggcagtaccgacaacacaacggcaaactgcgccattgattggtggaataaaaaagagcagtttcacctgggggaacacgaagaaagataagcttccctggataccttctgggtctttcattcaagcaatcatgatagagggggccgacgctaacgcgagtgttaccggccaacaatcaacaactcctgttgtctttactcttcagggtaatgtctctatgccaaatggccagatttacaacctagatcaatgtcgagttactggggaaatctggggtgatatttctagcgagagaggggaagtaagaaccaaaaatctttcctgtattctaaaagacaaaaaaattgtcgatatgccgtttgaaggccatgtctcttacgaaggtaaagaaggcgtaagaggaaagccggttatgcgaaacggaaaaattattggctacgcaggcgcagcaggattcttatctggaataggttcaggaatacagagtgcaggaacaacaactgttggactaggtgcttcggcacaagcaagcccaggtgacattcttaagcaaggttttgggggcggagcttcaaaggctgctgacacgatgtcccaatattggatcaaacgtgccgagcagtatcaccctgttatcgatatcggggctggtaatgctgtgactgttgtttttcagcaaggttttcagctttctaccatcgaagacagcgcagctcacaaagtccagaatcaggtacaaaaagcatcggatagtattgatgatgattcttccagtaacaatcaatctgcttcaaatcatgtaggttccaatatagaccctgatgaaatactgaagcaagccaagtcgcttcgactcggggatacaataccgcaataattatgaaaaattggtatctggtttactgcaattataatcaggaagatagagcaataattaatttagagaggcaaggggttcaagtattttgtccgatgttttcgcgagataaccattcgcctcataaaaaagggggtatatattcccccgatatttattttgcctgttcaatcctgaagtgatctctaaaaccacaattaattcgacgagaggagttagtcagctaataaaatttggtggcagacaggagataatccccaggatggtgattgagaatctgatgttttatatcgagaggagtcctgaagcagattttaaggggagggatcgccaaatcttaaaaatttatcagagaaagtatctgcaattattaaagggattttttcagaatgtgaatctgataaaagagttttattattcttttccctctatagtttgattgttagagatatagcaaaggaaatcgtggaaattcctgttaaaaaataaactttatccaaggtgttaatatgaaaaaaacttcattcactcttattctatgttctctattaaccggttgtgcaggaatgaattcagattttgattgtaataaaacagcaatcgataaatgcctcacgatggggcaagcacaaggactagcggcaacaggcaaatcaatcgatgatgtcgacacatcggcggatactgcaaaaaagcctgtaactagtacagtaacgagccctccgccgtttctgcataacacgcccgtaccggtgaagccatatgtggccgtagggtactcaccggcaatttctaaaggattcttggccagcacatcaaccgctggaatcagcacatctccagtttcgcagtacataaaggtcagtaatcctaattcgccaggaagtgtgtcggcgaatagaactggagacatcgttcagcgtttatgggttagtccatgggttgataaagatgataattttcatcaaccaagtgttgtcgaattcgtaaaaaataaatcgcactgggaccagagctacaattcaataactagtgagaactaatatgcctaaatccttacttgatactattacgagaatgataagcgggtctaaatataaagaggatgcggatgctgcaagaaaatctttgcaacaatttgactacccgtccttaaccgctttactcccttaccgtgtatatgatgatgtaactgacttatatataaacaaagatacggcaggatttatctttgaaattgcgccgctttctggtgccaatgaagatattattgcggcaattgatgatgtttttagaagaagactgcctcggaaaacgccagtagcaatatatctggtcgcaagtaagtgtgtatcagaagttgtgagcgctggtgtcagtgaggatatgtggcagggaatccacaaagaccgattgaacgcgattaccaaggcatttttcgaaagggccgcactaaagggttttcataataaaaaagaaatgcctctctatttgagaaactatcgtgtatttgcagttgttggtaaaaagacaaaaattaatgctaaaacaatgtcagaactgtcgatgctacgagaaacgttgagagtttccttccaagcctcaaagcttcacacacagaatctgcctgtaggtgagtttctttcagtgatgagagagttacacaattatcgacctggccaaacagcaaaaagctccaacgattatgatgaccacgaagaactccatcgtcaaattatcgatgcctcaaatgagcttgaggtgttccctgattatcttcgtcttacaacccgtcgacatcatgacgataaggatataaatgctgataacagcggggtagtttccactcgaattgttaatctacaaatttcgaaaaatccacgccaatttgctctttggcaaacgccggataatttgcacaatatccgttttacttccatgggaattccgtgccctttcatgatcacatgggggatagaggttgatgaccaaatgtcttcacaaagcgaatctttccgtaaagagcaggacttggccaagaaagcaaattctgcctatgccaaattcattccatccacgggaaaagcttatgaggaatggaagagtctgaggcaagaactcgggtctaactcaacttcgatgtgccggtatttttggaacatgacactgtttacgccagacaacgatttggaccagctgaagtgtacattggaagcgcaaaatgttctcaggaagaacgacttgccagtcgactctccacgttttcagcaaatgagaaactttatggccactttcccatttgtgttacaggaaggattgtgggaagacttgaaaatgagtggtgtgaccaaacgtgccactgtttacaatgcaattaatctcatgcccgttgtagcagaaagcggactgtccggccagggtagcccacttccttcgtatcgtaatcaaataaacttcttcgacctgttttcagaaaataacggtagtacgaatttcaacatggctgtcaccggtacatctggagcgggtaagtcatttttaattcaagaaatactgcgacaggtactcaactcgggtgggtttgccactgttatcgacatggggcgaagctatgagaacttctgtaaacaggcaggcggtgtttacctagatggagcaacgctgagatttaacccctttggcgatgtaacagatatcaatgaatctgccgaggggatcacgatgttaatgaccgtcttggctagcccagatgatgaaatggatgaggtaagtgaagccattctgatgaaaggtgttattgcagcctgggataaaggcaaaaataaagccaagattgattatatcgttgattatatgaaggatgagtctgggaaagctcacaacaaggacaaagatactattcgtaaccgcctagatgagctgattgtgcgactcgacagatattgcacatatggcccagatggagagtattttaacgcggaacagcctaccttgaatgccgacaccagatttgcagttctggaactccttaatctcgagtctaaacctaagcttcttagtgcgatccttttttccatcattctggcagtgcaggaaaaaatgtataaatcaccgaggaatcttaaaaaactatgcgtcattgatgaagcatggcgattactgaatggctcgaacgtacacgcagctaaatttatcgaaaagggttataggactgttcgccgccatagagggtcgtttatcacgatcacgcagggaatcagggattttaccggcgtcgatggtgctccgccgcctgctgaagcagcagctgcctggaacaatagcggtactaaagtgaccctgatgcaggaagcaaaggcatttaatgacttcttaaaagaaaaacctgatttttataacgaagtggaaaaaacggtaataaaaggctttcagccttcacttgagacaggcttcagctccttactcatttctgccggagaacgtagtagcttccatcgattgtttgttgacccaattacccgcgcaatgttcagttcaaagggcgagcattttgaatttatgagccaggctcaagtagcaggtgcaacttctgaagaagcagcaatgttattagccgagagaatttatactgatgagcttaaggagctggaagaatgggcgaaactaaattaaagaacaatttgtggcgtcaatttgtcttacctaactggcctctaataatatcgacgttaattattttttcattaattacgatgttcgtatctattgcagtcgttaaatcaatgacccctgaagtagtaaaatttgatatgaaagggactgttaactcttttatgtcccaaacagcagggattaaaacaacgctcagtaaagagcaaatggaccagatggttagtagatttaatcaggcaatgcaagggagcattgatgattacgccaatgctaataacgtcattgtagttgttagtccagcgatcgttggtggcgcacgagacatcacagatgagataagaaatagcattgctacgaaaatgaaaaagggggatgagtgagaaagattattattgcattcctcttgctgtgtgttagcggaagtgtgttttctaaagactatgggactatcggacagctttttcccattcaagaacctgaccttcttacatttattaagtcacggctaaatcaaatgcagaaagacggggagttaaatgggataagaaaaaaagcaatcgagaatgtcgagaaacatgcagttaggccagaggcagtacctggattatcacccgcgactgctgataaatcttggctttatgacccgacttttatcgtaaatcaagacatacaagatatgagcggtaattatatcgcgagaaaaggagataaagtaaatcctctagataaaataccatttaacgaaactttactctttattgatggggataatatatctcaagttaaatggcttgaggcacagttgaaaaatattattaacttcaaggttattttagttaatgggaatgttagaactgtaagcgaccaaataaatgagagggtttatttcgaccaagcaggggtgttgacaacaaaatttggatttcagcatacccctgtaatggtttccaaggaaggcgataaattgagagtgacggaaaaacacatttaattacttaagagtaaaatatgaaaaaaactcctctactaatactccttgtttcagtattgatgtttttatcgcttaattcaaaagctgataccggaaccggtgaagggagatgggtaaatcctattaccgatgtatgttggcaatgcatgttcccgatgacaattggcagtatcccagtatctgccggtactcttcccgatacgacaaatcctgcgagcccaatacaaatatgtcctgaaggaatattttatagattgggcttggcgattggtttttgggaaccctttgcgatgacagacgttactcgtgagccaggcaacatggttaatatgggtggccttaaaatcaatttaggacgcgtcggttcagggactggaggacaaagcgattcaccagagcctgggcgttctatcatgttcattggtataaatacccgcttatagcctggctgaatattattactagcgttgcttgtgaacagactggcgatatggatataggatacatgtccgaaatcgaccctttgtggaatgacagttcattgtcgatgattatcaatccagaagtatcactcttttcaaacctcgtcgcacagtcagcttgtgccgctgatgccatttcaagttcaatagcgcattatccacttgctccattattctggtgcgccggagcgcaaggttcgatgtacccgtttacgggttacgtaagtaatgagttctcgcccttagaagtctcggtactgctcagtgaaaggatggcattcaaactgcacagggagggattagtttgggactctgtaggtgccgatgtggctgtttgttttgaatatccgtcaccgataattcccaaagacaggtatcgctaccagatggtgaatatgatcccagatatcgcgcaatgccatccgtttggcgagacaacgcaagtgtggggaactgtccatacaagcccgacatcaaagaagaattttggatatcttatctggcgtaaaagaaactgtgtcttcctgtaggaattaaatatgaaattaaaaattattacttctattcttctgctttcatttagcactgtaaccttcgctgatatttcaaaaagtgattataactttatgaaaaaagagcaggacgatctgaaggaatttaaatcctcattgtcagaaaaaacattctcgctacctactagtcagcgagaacaagtaaacggattaattaatcagattcaggaacagaaaagtagatcacaagccgatacagaagaaaaaaaaccaacaaatttgtactttgtaagcttttcaattccggatgatggggtgttaataatgctaaaagacgctaatcactatcatttagctccaactatccgagggcttattgataacgatttcagaaaaacggctattaagatgtttgacctgtccaaagaagataaaacaattggtgtccaaatagacccaaccctttttctgaaatatgatatcaaagctgtacctgctttagtcatcagttgcggtactcattacgataaaatatacggaagccttccaattaaagatgctcttacgcgtatcgctaaagatggtgattgtaagagtgaagccagtaagttactaagggacgatgggcaatgaataattggctcgtgttattagctttgcttccttttttgtctcatgcagatgatctcaatagttcatatagcgcaggttctaattatgcttcaggtgtcgcgactcaagggtcgtcctcactttcagacaaagacccatcaactatgattaacggatattcctctagtcctagtcaagaaaactattatggaggcgttactggttcggacgggaatttatcatcaaatgggagcgttgagagttcgaaaaacagcaccgtgcaaactattaactcagctcaagcttctaatccggccacagccattgacccatcatcaacgtttatcacagcaggaaaaggttttgaaactaatgccagtacgataaccgatggtactaatacaatgtgctcatcaacaagcgtgactaaaagtacctttcaaaattacagctgcgatcgtgatttaaatgatgtgaaagtctgctccagaacagcaactgttacgggccattatgtagataactcagtgacgagttatatcaatatcgattctaatagccttaactttgatcaaaaaacaggtgttgcaacttatacctcaatccctgaaggaacaataatctccgcaacacttacatatcaatttgatagtcatttagcgtttggttcgtcaggatggtatttaaatgttgatgtgctcggaaaaaaaatgaatatgtatgatgacaatggtacttatacatacatacctaactggaacatgacagcaggacagccaattaccttcacattgggtaatcagcgaggctcttctattgcaggtacagtttggcaagctggcaaacgaaatagcatgtatcactttaatcttgccttagtagtaaaaaaaggacaacaacagtatgtgactgacacgagttggagtgaatcttgtgatttcgacaagtctaccgcaaccgccgaagtttcctcgacctgcgtttctcctggcggtgatagaacggtagtggtagatgggcaaacctacacgcaatacagtgactgttggcaatatcaagatgaatatgtagtgcctgcgaactcaacaggcaactgtgactcccttatcgcgaataaaaactgcacggttgcaactaggagttgtacttcttcagaaaacggcacctgccttcacgagcaagatgtttaccagtgcgagactgattatcaatcgtcaggtgttctatgtggcgggacgttttattgccagtctggcgattgcggtgaaacacagacatctggcgacaatggttttagtgccgctgtatcaaaactcgccgcagtttcatcagccggtagtgatatcgcatcggattcagtcgacgttaaagcattcacggggagtgcggtttcatgtcgaaaagcaatggctggtttttcaaactgttgtctcgataaagggtggggtaacagcatagggctttcccattgcaatgatgaagaaaaggcactggggacggcgaagagtaaaaaactcgtaatagacgttggtgaaacctgttccaaaaaggtgttgggagtttgcctccagaaaaaagaagtttactgccagtttgagggtaagttggcgcgcatcgtgcagcagcaggggcgtcagggccagttaggtattagctttggtagtgctgattctccaaattgtcgtggcattaccgtcgaggaactgcaaagtattaacttcgacaaaattgacttctccgacttttatagtgatttggaaagtaatgaaaatcttccagatgatagttctatggtcaattcggtaaaaagcaaaatagcgtctcaggtcaatcaaatggaaggtaagtaatatgaggttgattctaattatattaatggtgatttactcaagttgtgtattagccgacgaagatgtagataacatatcacctttcaccggctggcattggtataacgagcctataccaacgaaggatgttgaacccaagcaaaagaaaaatacaattcctgatttgagtaaaatgacgcccgttgaacagagtaaagtattgcagcaatacactaaagaggctttggctaaagctatcttatatccaagtagcgaaaatacgactgtcttcttaaaatggcagaaattctggactgaccatgcttcttattttagccaatcattcgctgttgcggaacttgaccaccctgagcttgattacaaccttgttcggtcgcattacaacggcacatcaccaatacagcaagcgcaacaaaaaacagaggaagataaagccatacaaaaacttgcttctcaatacggcctattcctcttctatcgaggcagcaaccctatagatgcacaaatggcaggtgttgttgcggcctttgcaaggtccaagaatatcccgcttataccggttagtgttgacggacaggttgttccagcagtacctgaaactcgaccagatgacgggcagagtgaagcaatgaatattaaatatttccctgcgttaatgttagttgaccctaaagccaaaacttatcgtccattagcgtatggctttatgacacaagacgatctggcgacacgatttatgtatgtagctactggttttaaacctaatttctaattggtgataacatgaaagtccaatataaaaaatcaacaacattactgttaacttcgttatttctattacaaatttctttggctcaagctaactcggttgttcagcaaattaccaatatcgaagaaatgaagaaaaataaaatagacaatggtgattcattattcgactcaacggtaaaagaaaacgtcccaatggagaagcccattcgtacgttagattatctgatggtagtgaggccgatcttagtaattatgcagtcgtcgtttttatgcaggctcattgtccatatagtgccaaatttgaccccaaaataaaatcgctatcccagcagatgggatttagcgtgtttgcttacacgcttgatggtgggggagacaaattatttccatatccgatggttccacgacgcattaacgataaggaaccactggccgacgagattctgacgttctttggtacgggtatgccaatcgctacaccaaccagctttgttgtgaatgtgaatacgaacaaagcgtatccgctttatcagggggatacagacgataccgaaattatgtcgcgaatgaacgaaatcatcctggccgatgaagggcacattgacgctgcccaattaggcccagtaccaaccggctcatccacatcggctcaataaggcaagcattatgaaaatgaagcaactcaccctttgcattattacagcatgctgcatcagtgcgcctgcacttgcggatgtcagcggagacctgaacggatacttcaatgggctcgggtattcgggcaacgtgtcgaaagcgcagtcttggaaagggcagtctgcaaattacatgacaggtgggtctgtttatctcagaaatcctgtcaaaaatatacagctgatctctatgcaggttccttccgtgaactcaggatgtggagggatcgatgcgtatctcggtgcattctccttcattagcggtgctcagatacaagcgtttgcaaagcagatcatgtcgaacgcaggaggttatgcttttgacctcgctttgcaaacgatggtgccggagctcaagcaggcaaaagattaccttgaaaagatggccagcgacgtcaactccatgaatatgagctcgtgccaggcggcacagggaataattggcggctttggccagtatcgcaggtttcacaaaccaaaatatgccaggacattagcggacaggataacattttctcggactgggcttcttcgaggcaaggttgtacggtcggaggagaccaggatagtgttaatggccgcgctgatgcgacccaaaaagacctcgtgttgaagaataaaaacctgatttgggatgcactcggtgtaaaccatgtctttgacgataatcagcaacttaagcaatttgtcatgagtatcgttggctctatcattttcaacaacagtgggcaggtgacgatattacaacccctagtagctgatcgtggagtggttaacacgctgatggaagggggagatgccaaagtgtatttatgtgatacaacggatgtttgcctaaaaccttcagtaggcaccattacgattggtgagagtaactccttagttgcgatggtaagaaattatattacaagtcttcaaaatagtgtgacgacagatacaccattaaccgatacccaaaaaggttttattaactcaacctctgtacctgtccttaaatacataatcaattcaagctcgctcggtatcgacgcaacctatctgagcatggtgtctgactatattgcgcaggatttaatgattcaatatttgcaggaacttgtgacccaggctaacgcatcgttaagcgctaagaacttccctgaacaagcggccaaagaattgaaagctaatataagttcggcgcagacgttattagtagatatgaaattgcagtcgtcagcaagccaaacagctttagacagtattaatcgtaatatgcaatatctacagcagcaggtctcgacgcagcttacttcttcatatcaatctaattataactggggtaattgatatgcaaacagtatataccacctttggtggagatatgtatcaatctgcatttaatgcagttgttactatcgttggagatagcggattccatactctgattaggatgtgtggtgtgttttccgtcctctctgctgtacttgggtactttaaagaaagacatcccttggtttacataaagtggctggcaatttatgtcattgtgatgtttcttattttggcacccaaaactaacatacagattgtagatatatctaatcccgcaggtatttacgaggttgataacttcccttctggattggcattcatagcaggggtgtcgaccggtagtggttatggtgtcgcacagttattcgatatggcctttcagtcagcggatgctttgagctattcaaaaactggtatgctgtttggtgctaatattatcgcgtcgggttccgacctgacatcaagcgtgccccacctttccgagaatcttcagtcttattcagagaattgcgtcagcggcgacattatgattaatcataaatatactatgaacgctgttatgaatagttctgacccgtggtccatagtttcgtctaatccgagtccggttcgtggtttttattatgtcgatgattcaagtcaaacatttatgacctgcgccgaggctgtggaaaaaattaatagtgcaatgaataccggcctttcggtcggaggtgttgatttctcgtcatttgcgcacaagttttatggaaatcgaatcgatgcaccttccctgatgtcagatgcagtagatagtagtaatcaatttttctattccgaaggcttaaatgccacgcaatttttaaaaggtaatattactgcatctgcattgaggtctggcatacagaagtattctgctagttctggtgatactgcaaatatacttaatatgacgtcagaaaatgccatgatgaagcaacgaatcggatgggcagcggagcatggcttggcgacaagaatgttgcctttttttcagtctataatggtgttgatgcttatctgtgtttttcctctcattattgccttagcccttattaaccactctgcatttggtatgaatacaattgcgacgtatgcatccggatttctatattttcagatatggcctcccatgtttactatattgaatttcgcttcaaattattatttaaagtctaagttaggcgatgttcccttggttttatcaaatgctgaccaagttagattacagtatgctgatgtttctaatattgcaggatacctctgcatgtcgatacccgtgctaagtttttatatcactaagggagcagcacatgctgcgtctcaagccgtgggcagcgcaatgggtggtgttgcaatgaccgcaggcggtgcggcatcaagcgcagccgatgggaattggtcattcaataacatgtctatgaataatgttaactccaataaatatgacgataatttatcccatcgtagtggaatggcaacgtatcaggcagataacggagccagcttgacacatactgccgatggccacaccgtgttcgatacgagtggggcaatatccaatttgccagtaagtatgaagtttagccagatgatgtcttcaggcttcaccaatcaagcgagaagcgcagaagcaaatgcacagtctcatctacatggctttaatgacgcgattaattctagcttcaaccagctcgcacaattgagccatcagtcaggcaatagcgatacactttcccacggaacggatagcagtacatcaacaagtcaaacaactggcgttagtatgatgatgtccgcagcagaagattatgcaaaagcaaatcatgtatcggttcaagacgcttatcaaagcctaagcagcaacagcttgacggaaacgggttcaattggaggttctgtcggtatagactctaagagagaagtccttggggcattgcaagtctggcaactgggatcagtggtgaagcacatattcggggtgaggtggccggtagccataatacgacgggcagcacgacggctcaaaattcggaaagcagcgattcctctcattcgcaaaatgcaaggtatgcgcaggacttcaaaaaaggtatggatttggttcagcagcagcgtgagaactcaggcgctaaccattcagataatgcctcaaatagccaaatgagccaatttgcagctacccttggtaaagcacaaagcgaatacaaccaatacacccaaagccaaacagcaagccaggaatacagtaaaatggctaactacgcagaaacacaaagctcaagcattgatgcaaattacaaccaagagtttgccgactgggcgcaagagaaatatggaacaaatgcatcgcgtattttaaccaatgccccagaagcccaaaaggcagccgttcagttcgccaacgagagattggctcctgaaattcagaacaacttcagatcaaatgagagtcgagcattaggcggcgcaggaaaagcttctgtcggaggtctcgggtcttctgttgagggaagcttcaacgcaggcgtaaaaacaatggagcaagcaatgcctgggatgaaaatcgaaaatgatatctcaagcaaggtttcagcacaaaactctactaccgcagaaaatatcagctcaggttctggttcgattaatgaacaaaagaataatatatcttcaggaaatgataaggttgtagataactatgatactacccaggctaaggtaaattacgatatcaatcataaaaaaaatgataagaatccaattgaccccaaaattcaggacagccttcataagttaagggagaagataaaatgagaaaattattcggattggtcggttttgttccaactatatttcttgtctatagaacatttgattttctaaattcaaatcagcttatgtcttatagtgtatccgctgtgctgtatttatttagtttgctctgtttatttatttccatctccctcggggcttttctgacaatatcaggttcgtcatctaaaaagggttctttactattctcaatattttctcttatggttagtttcttcataggcgtatatgtattgatgcttaatggtgatgttgatactggtagtattgtcataccttctttgctgtgtatattattacccgcaatttcagtttttttgataaaaatacttattggtagggacagcgggggtgtgaaaccttcttttaataagattaattatctggagagttcaggaagagaattcaaaaagtcgccttcacataaccccgctacaggtttaccaatggttaattcatctattgatgtgtctgggagccctttcggaataaacaatcataagatttaaaaaatctcttcaataatatccctttcttctttttacaatagggcgttagccctattgtaacttcttgagattttcactatgagcttcgtaccaaaaaatattactcaaggtgggcagattactgcctatcgtttcagaatgttcaatcaggtaaataactggttctcattttgggttgtattgatatttttcgcaataagtatgttggtcttttttgcttttactcctatgagtattatcgctaatgggctaacgtattggcttgctgatatgagtagttcatttctgttattaaacccccactctacagtcagaacatggagtgtgagggtttatgatgatgccggtgttaattatacagttttgaaattcactttggagcaaattctcaatagtaaagaaatggctgaagttgggagcatgtttcttactcgcttggagatttatgcagggcttggtgcagcagtatcttttggtatttattctatccttatgttctggattggtcgcgtaggtaaagaagagactgatgatgaatacatttcaggcatgaaacttactcaaaaacctgctgaagttaataagatactggcctcaagagggaagaaatccgacttgaaaattggaaagcttcatatggttaaaaatgccgaaattcaaaacttcctcatgcacgggaccatcggtacaggtaaatcaacactcattagatacctgcttgattatattcgaagtcgcggggatagagcggttatatttgattcaggtggtacgttcattgagacgcattataatccagaaacagataagattttgaatgcacatgatgaacgctgcgaatggtgggacttatggcacgagtgccaaagtgtggttgattacgaaaacatcacagcgtcacttatccctgtagagggagattccgatcctttctgggtatcaagttcccgcaccatttttgctgatagtgcaatgaagatggctaaaaacgaaaatagagatatcgaatccttcttaaaaattttattcactatcagtctaaaaagtttacgtgagtttcttgctaatacaccgtcgtcaaaccttgttgaggagaagatcgagaaaactgcaatctcaattcggtctgtgattaccaactatgctaaggctctacgttttctacaggggcttgagaagtccggcaaaaagcgtttcagcattcgtgagtggatgtcggatgaggagttcagcaatagctggctgttcatctcgacaaactcaaagtatcggaagtcggttaagcctctaatgtctatgtggttgtcaatcgcaacaatctaccttcagagtatgggggaaaaccctaaccggcgtgtatggttcatcctggatgaattgccttcgctccaaaaggtccctgaactgaatgagacactggccgaagcccgtaaatttggaggctgctttgtgattggtatgcagaacatggcgcaactgagtaatacctacggaaaagacacggcaaaatctttgttcgacctcatgaatactcgattttatggacgttctccaagcgctgaagtagcgaaagatatcgagcaagaattaggtaatcaaagacgtaaagaagcccgagagcagaactcatttggtttagatcaagtaagggatggtatttctattggtagggataaggtgagccaaccaatcgttgattacgatgaaataatgaggatggccgaccttaatttctatgtgcgcctgccaggtgactacccagtaattaatatggatgtaccttatagagatctgcctaagaaacatcctgcccttatcgaaagaaaaatcgacgataaattaagcccattgctagaagaactcatcgtacataatgaaaaagggatgaatacagattttcaaaaccagataattgaaaatcacgcgactttgacgtcgaccgcgccagagcaaaaaaccgcagtggtcacaccgccggtggcgtcgactgcaccggagcaaaaaaccgtagtggcccgcagtcggtggcgtcgaccgcaccgaagcaacaaaccttagtgctcacacagccggttgcagggtctgcacaagtttccaaatctgaagagactgcgcttgcgtttactataacgatgcaagaaagactcgcgaaattgcgcgctgataatcagagggttgaaacgcaaaataatgctcagaatattggattgcctgttcaaagccatactgaaattagtgcagagaagtccaccggtaatactgatgctttcaagttcattgacccgcgccgcaagcagtcaaacgataataccggtgaccaaagcgggggagatccgaggagcttgaattcgaagctatcgtttatgaaactgaaagtggtgctatggtcatcaaaactgaggggagtgaaatcacccaaaaccaaggtgcggtccgaaagatggcagaggaagaaaagaatattctcgttcaccgtgaacatggtgaacacgaaatggaggagccagagctatgatgtcagttgccaatgtaagttccgcaggtggtgctgctacttattacacaaagacagataactattacttcctcggaaatcttacagctgaatggcacggtaaacttgctgatgaaatgggtctagaaggaccggtgaatgctgagattttcaccgaacttttacacggcaaactacaggacgggacagtccttggccgagatgtagatggtaagcatgtacatcggccaggttatgatctgacgttctcagcaccgaaaagtgtctccatcctggccttgattggacaggacaaagatatgcagcaggctcataaagaatctgtagcggttgtggccgagtatgttgaagagttagcatcagcacgactgacggttgatggtgatacgcgtatggtcaacacggggaagataatcgccgccggtttcacccatgatacaaaccgaaatctagatcctcagctccatactcacctagttgtcatgaatatcaccgagcaagacggaaagtataaagccctcggcactgacctcatcaacaagagcggtttcggcgagctgatttacaaacaccatattgcactcggccaagtttatcgaaatgccctcaaggagcgtgtcgagcaattggggcatgagattgaggacgttggacctcatggcctatgggaaattaaaggcgttcctgaatctgtaagacggtcatactcgactcgcagtgaagagatcagggagtcggttggcgatgatgcctctcttaaaagcaaagatgtggcagccaaagatacgcgtaacgctaaacaggagccttctcgccctgaattaatggataaatggaaagataagctccagcaggaaggttttgatttagaaggctatctcaaggaagttaaaccacatagctcgaaagaagggccgccggcgattgagcccgaagccattaacatcatagccaaatccgtctctttgctaagcgatacaaagtcaaaatttacctttagcgatctacttttgacttccatcgagaacagtgaaaatacatatactgttaacgagttgaaaggcgctatagaccacgctattgctgaaagtatgatcatcccaatggacagcgaaaaaggcatcttcacatccaaaattcatatcctggatgaactttctgtcgagcacatggcaaaagaccatcttaaagacagccaggtatttacattcatgacgccgcgtgaaggtggggatagcaaaagtgagcttgcgtttctagagaaagaatcattatctgttgtgcaggttccagcgtccatcagcaaacttcgcgacatgactgagaatatggtgagtttcaccacagaaagaggccgtgacgcggttgtactggcctctacgacagcaagactggattcactatcccgatcacctgaactcgcagataaagtcatcccgaagcatagtttgctcagcaatgactttaccgtaccggagcaaagcacggtttacgttgaagctgctgaaaaaatgacgctaaaagaaacggttgttctgcttagccatgctcgcgaaaaaaatctacaactcgttttcatggatagcactgccaggcaggctaacagcaacgtgctatctgttctcaataatgcaggagcagagaagcacaacccgtatacaccctcgacaagcttgaaactcaggttgtcagtatccctgataaaagcacgcgttatgatgccattgctaaaagatttacggagatcaccagtactggtgaacgagcaacggtcgtcgttaccggccccgtgagcaaaaaaatctgacggggatcatccggaacgaactcaagaacgctgagttactcgaaagcaaagatatctctatggaatcacgttctccggtgttcgtcaccgagaaaacgcgtaaacagattgggacttaccattcggggatggtcatcgaggataggactgaaaaaaacagaaaaacatacactattgatcgggttagcgaagaaactaaggttttggttctgaaggacgaaaaagggcagcaacataacaaagctatcggcgaactcaacgcagattggcgcttgtttgagtcccaaaacattcaaatcgccataggcgagaagctctcaatgacgacggccagctacaaagaaaaagtgaaggcgaaagcttccgtgacggtaaaagcgatcactgaaggtggcgttacgttatcagttaatggcaccaataaagaatttaaagtctcagtcaatgaaccactgtatgcgcggtatgattatgtctctggagcaggcgctaaagataatgagcaagggattgtcatagcagggctaaccacccatgagctaagcctgtcaatgatgaataccttggcacaatctggaaatcgcgcagaggtatttacggctgaatcacaggagaaggcggaaagtaaactcctgcgacttaacaataaaaagtcgatacttactttggtgaaagaagcatccggcaaaaccgatacttcagaatccattgatacgctaaaaaccaatctcgagacagatggccagaaggcagtttctcttgcgattgaaaacatgagcacagtttcattcagcagacttgaacttatcgataaagcgctgggtattcataacaaaaattctgaaattttggctgaagttaataaaagggtttcttcaggtcaactgatcagcatggacgtaaacggtcagtctcatttagtagcccgtgagacgtatgaaattgagaaaagcattgtatcgctcattgaaagcgggaaaagtgcggttaaacccctcatggaacaaattgacccagccaggctagaagggctgacggctggccagcgtgctgctactactatggttttatctaccgaagatcgcttcatgggtatacaaggctacgcaggtgttgggaaaacgacccagttaactgcggtcaaagcatctcttgatacgttgcctgaaaatgagaggcctgaaatagtcggactcggcccaacgcacagagctgtagccgagatgcgctctgttggcatagaggctcagacagcaaaatcattcatcctggacgttcagaaacggctcgaagccggtgaaaaggtcaattttgaaagaacgttatttctaatagacgaacagggcatgatcggtaaccaagatacgagggatgttctttccatcatcgacaaagcgtcaggccgcgccgtactcatgggagatgacgaccagctggaatcaattgaagcgggtgcatctttccgtctcatgcaggaccggtcgccgatggacgttgccatcatgaaagagattgtcaggcaacagactccggaactacgggaggctgtgtatagcataatcgacaatgaccccgcaaaggcgctggcgctgattgagaaagtagatcccgctattgtgcctcggaatgctggaatcgacattccttcatctgtcgttgaagtgaaaataaagcaggctcaaactgatgttgaatcggttacaaaacaaccatcaatccaggagcacattgcagcagattatttgagccgcacaaaagaggctaggaataatacgctcattatcactcagcttaataacgaccggcgggtgatcaacaagaccattcataacgaactcttgaaccgtggcgaactgtcgcctaaagctatagagctaacgacgttagtgcgtaatagcaatgagcgaacagcattcaacagtattaataattggaaggcgggtttagtcgttctggaaaacgacagctacatgcatgtgactaatattgataaaaagaatggcctggtacatatgcgaaatgctgaaaataagcatgttgtgtattcccaaaagaactcaattcacgccgtatcgaggtatttgaaacagaagatcttacctttaatgaaggggaaagcattgtcttcaaaaagtccaaccgcgaccatggccacactgcaaacgaaaagtatgttatcaataaaattgatgataacggaagtatctacctgagcggtgaaaacggtcaaaaggtcataaaaccccgtcaattctaccacgataagcatattgattattcatatgcgacaaccggctatggagcacaaggggcaagtgcatcttatgtcatagcactggaaggtgtcgaaggaagtagaaagcgtatggccaatatgcgcgggttctatatttcagcatctcgtgaaaaatcccatgttcagatctataccgatgaccgagaaaaatgggaacaaaagcttcaacaaaaagaggctcagccacgtaccgcgcatgatgtcctggcacccgaacatcagaaagaaaaagcgcaatttcttatgtcgtacgctaaagaagccgatagcaatttcgctgtcagaacatggatgtcacagaacggcttaaacaaaggggacatcgatgtaaaagtcctcaatccctctcgaaaaaatccagaaacaagattggtcctcaagtccttggataatttcggtaaagaaagtggtattgaattggtgtcaattgagcgtgctgtcgatggggtctacaggaccacaacatctaagcctgtcaatacgcagcgtactcaagcaaatctactgagaacgagcctcaacaataaaatgtacgtcgctcgagacattgaggaggcattgcatgttgccagtgaagataaacagactgggattgttatctctgataaaaatccggatagcttcagcccgatatttttgaaaacagtagggattatttttgataagaaagtatctttgccagaagtgatccagccgacaattactgccgcattgaaagagagtatggccgcccagcagaaacaaattcaagaaccggcgatacgtctaacggaaaacatctcgtcagataaagctaccgaaagagcactgcgggatgcactggcggcaattgcaaaagaaaaagacataaataccggcgaacagggaaaattcagggagtatggtgatctggggttggatacagttgaaggcaagctgaaagatttggttcaacagctttcacaaagcacccgagaaaaatcttcagaactcaggttatcagttagagagcaagagctgctcaaccgagctgctaatgagctcagtttggatgtcgtgaaagacaagctcgagcgcaccactgacaagattactggacggtcgcagagagaaatcacatttgaacgtgaagagtatgaaaatacgcgttctcgtaatatggataaagaaatatgatcaggtcaattcgttttatgccagtagcggcattactaactggtagcgcggcgatagcagcggaaacacaggcggtgggttttacaccagaacaacaggctacaataggtaaaatcgcatcagattacctcgttcaacatcctgaagtgctgattaaggtcagtcaggaacttcaagcgaaacaacgcacacagcagcaagaactaatgactaatgccgtaaccaagcttcagaagcaattaatggaagtaaaaggcattcctgttttaggtccggacaacgccaaagttacagtgaccgaattttttgattatcaatgcatttactgtagccatatggccctgacagtagaatcgcttattaaaaataaccctgacgtgaaattcatctttcgtgactggcctatttttgcaacacattggaagaactctgatatagcggcgttaaccggtttgaatgtatatgcgcaatcaggggcaaaggcctatttgcgataccataacgggatttacgcaactggccatgatgaaggtaaactgagtactgatgatattgctttagttgccgctaaggcattgaaggctgcacccacaatgactgtctcggataatgactataaggttactgtaggtaagaatgacttacttgcgcaaggcattggtatttcaggtacacctgcttttatcatcatgcctgctcagaacgctacggctaaaacgataactgttgcatcaggcgcaaccacccttgacgcattacaagctgcaataaatagagcagaataataaaggtttgaggtggcaatgcttccagtaatctcttccactgtgccaaaaaacagacttagggtacactttcgtacggtcgggcttcagaccttctttttacatggcattactgcctttattatccatgttatgttggttaaattatacttttgtgcgccgaggtgaacgtgatggatgcttttaaaattctggaattgaaagaagaagtcgacaagcttgaagcacggctcgaggcatcacataatgatgcgttgatgtctttcgagcaaaggctggagttatctgaagagtacacgaaaaaatataatgagctaaaccgtttatgttttgagaacatcactaaaatttcgtgcgaggtccccactttggagcaggatcacacagaccatacgataactcaccgttggacttcaactccctagttttacccctatagattttttctaattggaatgcttaatgtaaaaatttataccaaatcgcaaaacgcttatttcataggatcattatcttgcgacgatgagaaatcagcaggctaaagaccgtttaatattttttgataccatggtttctttaatggtaagatcatgtagatctttggtcatttccagagtattcttggtaacaatttacaacttcttgacaaaaatctgatacggtcgaggagtacagaagtagtatgaagggagctgtgccagaggagtttattaaggtgcagaaagcaaaaagacctgaaagtgattggaacttggcggctcacactcactaacaggtctttccaactaaacttgtgcttcgggaagattataatcctatggataatataattcaactcctgccagccctaaggctgggtgggcgtgtctgaacagactttcagatcttgttacgtgaaaaacgcgaacccgtcgtttaccgtgcccaagcatcacacacacaacatccccctttcaacaagcgtatgctgagttgcgtaaggggtcgggacgtctcccgatgggaaggcttttactgcctgcctgcctatcaccacaaaaaagaaggccagcgcatcgagcgcaggcgccattttaatgcccatcgtgcaaaagctataaatgctcttgtagaagcaatggcctaccacttgcaccttgtgtctgggactgttcctgttagctttaccacccttgcagaagaggcaggactgtctacccgctcacaagcaggaaacctctccattacacgtgcgacccgtgctgcgcagactctcgcgcaatgggagtcatccattacagattgatgtgggataaagtgaccaagcaatacttccccgctgatatcgaagtgacgcatttgttttttgatctgattggcgtgggaaatgaagcttacaaaaaagcccaaaaccagcaactcgcttggataaatcttgatttggccaaagctggggaacctgcgattagcctgacagaggcacgccgcagacagaaacaaaagcttatcgatatcacctggaagcgcagaaagaccacgcaggacattaaagcaaaaagaaagaaagccaaggcggctctcttaaaagacgttgccgaattacggcatctcgctgccaaacagctgcaatttgagatgcgccagggattgcatgaaggcatcgatatggccggatttaagcagcttctcaatcagcggatagcctattaccgcaaaactgccagcagttcagatccaggataacctcccttcagtttttcacaaatccgcgccggcggaggcctttacacgcccgtacctggattatcgaagaaattagttataaaggctgaacgaccacaccatcatctttgcacagatatggcattttacggtgttcattcaagataatgaatattagatgcatctggtaacttaatttatatgcatacagaagattatatgcgtagtgacttaaggtcttagtagtactagttatttaaatctaagagtaaaaatactcttaataagtgaccgcccttacagcgagctacgctcgcgccggttcggattgtcgctacgctctgagttagctcctgctacgcaggcatgctcgttgtatgaatagtttgtcttcgaccattgacctactgaaatgctttaagaccgaggcttcgcaaaacccgtctagcaggattatgctcaaacgaatgtaacgggctgcaagactttaaaaataggaaggtgaagtacagccctaaaaaagaaagaaattgccactgtgtagctgagaggagatgtagtggctatctgtgatgtgtattgcagaatttaacaacagagttaggcatattttttcggatgtaaggtataaaaccgtcaggtcatactggataaagtagagcaagttaaccaatctttaattataatcttttcctcggttccaacggtcctgccaatgtataaggtattgattagcaagtgaaggtaggtcctggatatatacagcattctcggaattacgtttcgccgcagaactggtgtagttatagctccccgtctcaacagaaacattgtctactactattgttttatcatgctggatcgcgaagtcagagtctgtccgtaaaggaattccggcacgagtaacgtctttcatagcatattgactatattgatcgcggtttcctttttcatcaacaacaatacgtacgtcaaccccacggtgttttgccactatcaaggctttaacgatatccttgtccgtaaaactgtaggccatcatacgaatagtttcgtgagcactattaatgacattcaaaactaattcgtgtgcagtgccttcgggtgaaaagccaacgctcacagagggttcagcataaattgataaagggatcaatgataaagaaattataaataatggtttttttttcataattttctcttaacgttctgttagtataaaaaattcacaaaatattatactataaaatttcgagcattggatttaagcagaataacaatatgtaaatatgattaatgccgaagcaatattttgaataataatttcgtttaacctttgtatacactgcgaacattagatcgtatttgctcgaaaataaggtctttataaaagtcaggcaataatacaaaccaatcatcgaatccccgcatgtcttcgagggcatataagacattccaggctacttgtgttgacctatctagattagctaagagcctttccatgtcctccaagtgtagattgtcctggtagatataagtcattaaatcagtgtatgtcgcgccgccatctggcatgtccatgaaaaatactccctcaaaatcatagtggacttttattctcactattgtatatgtattatctatcatcgcaataaaaagtgggacataaatgtagcatcaattttagaacgcttagcaccaaaactaaaaatctttaccacaaaatacatacctttcgcattcttgtttaattatattaactttgacatagtgagattatgttggtaaaatttcataaaataagaatgtgataactttccgcaccaaaatataaaaagatgataacatacaccaaattatactatcaactatagtataataactttatagggaaagagtattatgtaaattaaatatccatctcgccttcttagttatttactaacatatcgataggctcgaaacgagaactcaataattaaaactatataaattgaaagtataaaatggaaataaatattattatatacagttattcatgcgtgattattgtcagctggatatcttgggcaatacatcttagaaaatcttcccaacttcaaaaactgtgggattctaatagttgtcaatacatgctggatcttgaagaagttggttatgtaaacaatattttaaaaacagaactatccctagaaaaagaaaagttaaacgcaactttatactttccttgtttttcaccgtgaatggtattgtattgtttattttgaatcattcaggcattataaatagatgctaggttattgataagtggtagtattaatccttaccacttttgttccttcccccttctgctggactgaacactgtgagcgatacattatatctgatatgttgtatgaattggtgaaggcttcgaaaaagcagtactcaacttcatttttaacttcttaggtttctgaaaataatagttttttgttcattgctgcaatagatgtaattaaatatcgtcatttactcgataaatttcactagcactccaccttcgtgtcttatatgatatcaatatcaccctaagataggtgagcaacaaataaggagtagatatggaagatgataaactagcaggcgcgattcgtgacttttataatttgttcagcaaacacgtgacagacttgaaaaacccaaataaatgtagcacagcacaattgaaaagactcgagactccattaaataagagttacgatatcatcggtaacatcttgttcaaatagaattttattccagacaatgacgccgcaggaaaaatgaagcatcgcttcataattttcgaccttcttttcccgacgtgtcaggacatggcggtagcgattcatccaactgtacgttctttctacaacccagccatgagccttaaaatccgtgttttgatggcttctgactcatctttccttgagtggatatgaggttcatagcggcggtctttcagatacgcttccagccatccggcttcataccctttatcctatacacagccggagacttctgtcgggtctgcccgccttaagggcttcaagagtatctgcaaccagctttatgtcgtgggtatttgtaccggcgacaactacagcaagtggtagtccgttcgcatccgtcatcaggcttcgcttgaccccctgttttccgcggtccgtgaggttgcggcctgttttttggaagccgtttatcatattacggaacagatgtaaaaaaagattggcctgagcatgttgatgcgattgaaaaagcgctatcaggcaaaaatgaacaattcaccccaattgctaactaacatgcatcctagaacaaaggcctcgcctgcggccttctacgttgcttgttaaatccctgcgccacattggacttactggtaattctgttcagttgtgctgcacgatctgccaaggtagaatcaattaatcagcaacatgcgaggtaatgatgaagacgggaaccggagttaacacggtacgtatcggtgatgaggtcaagcacattaccgaacttgatgacacgacgctcagttacgagtggtcaaagcttaaaacggagaatgctgacctttatagttataaccggaaggttaaccagggctggcgcggctttattcttcgtatgataggtgtgcatttgccggataaagaacgggttatgattggcggcataaatgacagaaaagattccgtctatccagactgaggctgcgccagcggcctttttttacgtcctcgctttattacctcctcacctggacgtacagtgaattctgtccatttcccgcccctggcgcggcttttcacctttgcactatatctagtggctacttcagctgctaatgccacaacatctagtgttcttctctggccatcgcaggctatcggcccctgccctgttggctcgccacgttctcacctttttctcattggactatacttccctgatggaataagtgtccagaggtgagaacttacgatcccgatttattgcgctggcccgcgccccgtacggtgcgtaaaatcacaggcagtgaagaaggcccgtcgccggtccggatattttactcggggaccggtccgcgtgccgacacaagatgttggcgcggggactggtcaggcaagcacgccccgcgtgcgcggcaggcttttcctttattccggtgacggactgcataattaacaggcaacggagattgaaaaattgcgagacttaccccgcgaactttttcagaattcacacagcgcgatcagcacgatttctcatcccgcgagcaccgacatggcgctggcgctgcggatgcgcaaccttgccgctgccatgcctggccacatcaagtacctgctgccggtcgaggtctcggcgctgatcgcctgcgctcgccaccttaaacagcggatgtttctggacacgctgtggaacaccggcgcacggctcaacgaagcgctggcgcttgcacccaaagattttcgacttcagcccgacgctgaaccggcggcgcggcggggtcgcctggaaatactttcgcactatcaggccaacgtcacgctcattaccctgaaggcgcgaagcctttcttctggccgtggtaaaggacgcgtgccgaccgctgagcgggagaagatcgcacaagccacacggattgtgccgctgctcgaccccgactatgccaggcgcatggacgaatacttgcagacctttcaccgtggcgagaagcacacccagctctggcctgtgtcgtcgcgccagacggcggcgaactggatcaacgcggcggtcgaggaagcggcccgcgccggtgtgcgcttttcggtgccggttacctgccataccctgcggcacagctatgccatgcacctgaaaatgaacggcctcgatgataagacgctgatggcgctaatgggacacaagtacgcgaagagtttgcaggtgtatacgaaggtgtttgcgctggacgtgctatcgggcagtaccctgcgatttacgcagagcggcgaagacgcggtggcgcagctgcgggctattcaacgcagttaaagcgcgagctcactgtcattaaatcatgatttaatgacagtgggatgtgttgaaaactatatgttgctggcactgttgttttgaaccttcttggctgcattggccgtgagcattttttgccgttcttcttccctggatttcaataatttcaaactgttttgtaaatctgctctggggcttctgacgccttgccatgcatcatttttaattttcaattctttacttatatcactcgataaatcacacacatacatacctagcttcgcatactgcttacgccgtaacgcgaagtattgggggtgctctggaggatcatcatagatatatgtttctaagcgacggttgattgtgaggagtttgatttcgatggattgcagtctataaagcagcgcaggtttgagaaatttatattcccccttgagcgctgagagatcaaaaacaggtgaggcaacctgggcttcagcctctccagttttcatccactgaggatcataaccgtcatccctggccacagcggcacagtcagcggcaaatttatctaacatgaaaattatctgtacctgtatgtagtttttttctcgttttgatctgctgtattcgacatacaggttgacgccctggggcattattgctgccaggattgctacgccgagccccagatagtgatgtcatagcccagtaatgttacgtgtgtatcagccatactttactcctgaattttgcacttactctataaactaatgtactgaaacgctttatgctgagtaactttttacaacaggactatcaacatatactgcgtccacgtcatctgctcccctacttgtctatcatttttgctttgcctgcgctgcgatagcctcacaatgaacttttccgtataggtgcccaggaaagccgcatcagaccgttattgatgccggtaactgtcagcgtaccaaacttaccaaagaaggccagaatgaaaatgatatggatatggtcgggccgaagaaaggcgaaaagaaagtaactaattaataataatggggtccgtttggaaaacggaaattatcccacgctaagactgttttttgtacaattcggtatcgactgtgcgtaatggccgatatttcccggaccccagcttaagattattacgccagacgtaatcgccactcagattgatatgttcccagcccagaggagaaagatgagataccagttgctcattaatcgggatgccttttcgtttcagtgcctcaatggctctttctatatataccgtgttccacaacgtgatcgccgctgtcagcaacgttagcccgctggcgcggtaactctgattctccagaccacgatccctgatttcacccagacgatgcataaagaccgcccgcgcaagagcattacgggcctcccccttattcagccccgcctgtacccgctggcgcagacccggatcacgaaaccagtccagcataaacagtgttcgctcgatgcgcccaatctctctcagcgctttggcaagtccattttgttttgggtaactggctagctttttcatcatcagtgatgcggtgactgtccctgtttaatcgaggttgccaggcgtaatacctcatcccagtgcgcctcaatgtctttgaaattcaggctggttgttgatatgacggactgaagtcccggatagcgatcggccttaccatgaatgaacagccgtttgtcatgaagatcccggatccttggcgaaaaagcgaaccccagcaggtgcatcagggcgaaaacatgttcagtgaagcctgcggtatcggtgtaatgctcggtaatttccagatcgctttcatggtacagcaggccatcaagcacgtgggttgagtcgcgcacccgactgatcactttggcatagaacgggctgtattggtctgagatatgtgtataaatctgcacgcccggctcctggccatatttaagattgacctgaccggcataacgtccgtgactgccaacccgaaagttctgcccgtctgacgacgacgttgtaccgtcgccccagaatgcggccagaggtcgcgctttctgagcgttgaccagctcggccagcgccgctgaataagtttcatctctgatgtaccatgcctgaataccttcgagtgacgatcttgttgcccccgggcaggattccgccatttttgtcagccccagattgataccgtcagccagaatggtggtcagcaacagtcttccgtcttttggtctgacgttattatttttgagatgagcgaagtgacgcgtaaaccctgtccagctgtccacttcttccagtatctccgtaattttcggatggggaagcatgccataaaccaaatcggcaaagggggaaacacctgaaggaacgctgttctcaagcggagtgatttttacgcctttatctgagatatcaacatcgggcaaatcaccggcaagcgccatcgcgttaacttcttccagacgcgatgcaagaagcgtcatgcgggcctgaaggtatgcctggcaatcggtctgaacggccagttgtaactggtcattatgtcgggatttctcaaactcagcagccgggatgagataatcatcaaaatttctgtaacggcgcgatccttttacccagatatcaccggaacgtaacgcccccttgagttcatttagcacgcaaaattcgtaatacttgcggtcgatccctgaaggagtgagcaccagttttcgccagctttcagggataaatcctgtgggcgctgcgggcggaactttacgaagttgtttacggtacatttccgctatggtgtccagcgcatcgctgagcgcctgcgccgcaggtgttgccatgaactgcaatgctgacagcatacgcggggcgtatttacgcagcgtgctgtatttttcggtgatcaggtgaagtgggtcaaaattgcccttacgggacacaaaccgcgtttcctccacgctgttgatgaattcctgccagggaaggacgtcttctattgcagcccagggatcttcgccagattctctggcgttaagtaacgcctgcccgacggtaacgtactgcttcagcttgctctgaataagctttcccgtttgctggagtcgttcggcctgcgtgcgttttgcccggctgaacagagtacccagaatacgctcgtgcagatcaatgacttcgtcagtcagggtggccctagcctctgttattatacaaaccagcgtagcataacgtctgatatcggtgaattttgccaggtctctgctgctcattttcctgccctcacgcgccagtttaagcaatctgttctggtgaacggaaagcgcaattccatcaggcaatctcagcgcggcgatggaattaagccggtcgatatgttgcagcacgtttttaccgttgattttacccggaggctgaagtagccaggccagacgggaaggctgttcaccctctgatatgagcaggctgtcgagtgctgatttattctgctgttccagttgcgcggtaagtgccgaaaatacggatcggtcagcgagcgtgatgacttcggcaagcgtccgttcaatcacatcaacagaagggaaaataacattattgttatgtaaccagctgagcatttcctccgccagcataaatcctttgtcagttctcatggcataggggtgcagatgccggatacagtctttttgcagtgaccgactaaacggggataatttcaggtagcgataaagttcggtcagatgttcccagcgggtttgctctctcgatgcatattcctgccataaatcaggctgaagtttcagtcgggaagcaaccctggatacaacgccattgtgaggggcactgcttttgtccggaataaatccaggtccacgcagataacagagtaatacagcaaagcccaggcgattagctggccgtcggtgcttattaatgagagcaacatcctgttcatttaaaaagcacatccgagtcagaatcatttcatcgtctggaataaccagcaagcgttcctgctcttcactgctgagtatttgtctccgtggcataaatgcttcctctgcatatagtttattcgagttatcgctttgcgctgaccgaaatcggtcggtttcgtacaccattctgtaaacctgtccgaaagtaagtgaaattcgtttcggacagctgctataattcggacatccatttcgtacggaaagtttcctatgtcacgcatttttgcttactgccgcgtatccacacttgagcaaaccactgagaatcagcgaagggaaattgaagcggcgggttttgccatcaaaccccagcgactgattgaggagcatatcagtggttcggttgctgccagcgaacgccctggttttatccggctgcttgatcgcatggaaaatggtgatgtgctgattgtcactaagctggaccgtcttgggcgtaatgccatggatatcaggaaaacggttgagcagttggctacatcagatattcgtgttcactgcctggcgctcggaggtgttgatctgactagcgctgccgggagaatgaccatgcaggttatttccgccgtagcggaatttgaacgggatttgcttcttgagcgtacacactctggtattgcacgagctaaagcatcaggaaaacgttttggccgtccatcagcgctgagcgaagatcaaaagcgggctgcgatggaacgcctaaatgcgggaagcagtgtcagcgccgttgcccgtgaatttaacaccacccggcaaaccattctcagggtgaaagcggcattcagaacctgagaatggagtttcaccgattacctgagccgcttacctgactcgtcggtgactctttcaccatcttctttcgtaaatgcgcctttttgtggctcaggaagaatatccagtaccacttcagaaggtcggcacagtcgcgtccccagggactcaccacaacaggacggttgatcagtatcggatgctgaagcataaagccgagcaactgctcgtcagtaaacttatcgtcggcaaggcccagttgctcgtatggctctacgttgttacgcagcagcgcacgtactgtcattcccatatcggcaatgagttttaccagctcatcatgtgagggcggggtctcaagataatgaataatcgtcggttctgtgccgctgttacggatcatctccagggtattgcgcgacgtgccacaggccggattgtgatagatggttatattgctcatttcagtatctcattacaaagtgacggaaagccgcaacgccagagcggccagagtgacaaacagcacgggcagcgtcatgataatgcccgtgcggaagtaataacccatgtgatggtcatatttttctgggacagcacgtgcaaccacaacaaggttgccagactcccgatggggtgattttgggtcccaaatcgcacccaataacgttggcgtagatcatcgcttctttgatggcaccggatgccgtacttccgtcaatcgataatgcgccaatcaacactgtgggcatgttgttcatgaccgacgacaggaacgccgtcaggaagcccgtaccaaaggttgctggccataatcccttttctgccagcacattcagcaccccggagagatattctgtcagtccagcgttgcgaagaccgtaaaccaccaggtacattccgagggagaagataacgatttgccacggtgcgccacgtaagactttcccggtgttaatggcatgaccttttttcgctacggcaaacagaactcccgcccctgtagcggcgatcgcactgacggggatgcccagcggctcaagcagaaagaaccccacgagtaacaacacaaggactatccagccagccttaaacgttgccgggtcctttattgcgctggcaggttcttttaaccgtgacacgtcatatgtcgctggaatatccctgcgaaagaaaagatgcagcatacccagcgtggcgcgatggcggcgatatccacggggatcatgacagaagcatactctgtaaagcccagcctgaaaaaatcggcagagacgatattcaccagattggacacaataagcggcaaactggccgtatcggcaataaaccggcggccatcacaaaggcaagcgtagtccctttactgaagcccagcgcgagcaacatggcaatcactatcggggtcagaatgagcgcagcgccatcgttggcgaataacgcagcgacagcggcaccaagcagcactatccaggtgaacagcaagcgtccgcgaccattgccccagcgagatacatgcagtgcagcccattcgaaaaaacctgattcatcgagcagcaggctgatgatgatcacggcgataaacgtcgccgtcgcattccagacaatattccagaccaccgggatgtcaccaggatgaatgacaccgaaaatcagtgccagcaccgcgccaatacccgcgctccagccgatacttagtcctctgggttgccagataaccaggaccagtgtcagtaaaaaaatacttcctgccagtaacatttcagaccccattacatatgattcaaagtatgtgtatacgtgtcacttaacaggatgacgacgtggattctgccagccattccccgacatcctcccgcaggcataaccaggacgtagtgatggtttcagcggcccaggcaggtatatgtggggatagtcgatagtggatccatttcccttcccgacggtcaataaccagccctgattcacgtagtatcgccatgtgccgggatattttaggctgcgactgcgcggtggctgcgcagatatcacagacgcacaactcgccagactccctgagaagcataatgatagccagccgggtttcatccgacagaattttgaaaagctgaacaggttgtagcatttttcttcctgattaacttagaatacacatatgataaagcatatgtattatttttagaaccaccgatcattaaaggagaaagaaaaatggagcaatttccatcactgaatagcgaatgctttgataaacagattgctgaacggctggcgatgcaggagccgccacgtatcctgatcctttatggttcagtgagagaacgctcatacagccgttttgcagctgaagaagctggccgcttactgacgtcaatgggcgcagaagtcagagtgtataacccttcgggtttacctttgcctgatgatgctccggaaacacacccgaaagtcgtggagttacgcgaactggtgagatggtgtgacggaatggtctggagttctccggaaaggcatggcgcgatgagttctgtaatgaaagctcagattgactggatcccgttatctgaaggagcagtacgcccctctcaggggaaaacactggcagttatgcaggtttgtgggggttcgcagtcgtttaacgcagtcaatcagatgcggatcctcggacggtggatgcgaatgttcaccattcccaaccagtcatcagtggcaaaagcctggcaggaattcgacgagaacgggcgcatgaaaccatcttcctggtatgatcgcatcgtcgatgtcgccgaagaactgttcaaaataacgctgttactgaaagggcataaggattatctggccgacagatacagtgaacgaaaagagagtcacgaggaattgtctacgcgggttaatcaggaaaaaatctgaatattttgtgatgtctgctttgcggtagtaggaacgccatcgaaatcaggcatcaccacactcgttgtatgaaaaacatccttagcgtgggatattttccgttttccaagcggacccataatgactattcctttcaaccattaatgctcccaataggagccatatgcatttcatcaccgtttctcgaaaccgctttcgtccttatcggggtaggttggaatatagcttttgagttatcgcatttaggttatctctgtagttataaataccgccgaaagtcttatatcgtgtcattacccttccccccaacgatttgatcattaaatcatgatttcattcttttcgacattactgagaaatgatgtataattaaatcatgatttcattatataggtatttcatgaaatcatgatcaaaaaatccattattttacataaagttagatgtttatacgttctataatcgttaataattcaagtaatgaaataatgaaaaggtgaaatcatgattatttcttgtgtgggtcaaaaaggggcgggtccaaaagcactcatgcacgcacgctctatgttggttcacagatgcaggatggaagacgcatttagctgatattgacgagaagcaacaaacctcacttaagtgggcccagcgtcgagaacaggccaatttaggcgcggtggattgtgctctgtatcgcagagtagatacagccgtaaagatggcagacaagttcgacttgctcatcattgacggtcgcccagcggcagagacaacctctctcgatgtagcggagaattctgatttggtcctcatatcaacgggtacttcaattgatgaccttgagccatctcttgagcttgctcgcgaattgattaaaaaaggtatctccagagataaaatcgtctttagtgtagctaaatcaccaagtgatagtgaaggtcgtaaagcaaaggcaacaattgaggagtggaattttgccgtgcttgatacggtcatcccgttcaaatcaggatatagcagtgcactcgattctggccgagccttgtttgaaacgccgtttaaaacgctaaatgaagtagctaaaaagatggtagaagaaattcatgatatcattaattaatgttatcatgatttcatgaaataatattttctggagtgtaaccatggaaaaacctaagagaagtatttctaagctggcaccaccggcagacaatgagccaactttaaatgtaacaggtaagggtgcagaacccgatttcgcaactaaacctattcaactcaaagtccctataagcaaacacaaagaaatgaaatcgtatgcggctgaacagggatcacgatgcgcgaaatgttgttggaagggtatgagttgctgaaatcaaaaagaggatgatttcatgaaatcactttttaattaaatcatgatttagcgtgtgttttcctcattgttattgacgacaagtgggaggaagtgcggcaactcacaaagtgagttagtgccaccagaaaggtggcccaggctccgccgcgataacccagacttctacctaaactctagtagtgaataaaagtcgacatgtaagagtcgacttttttgtttctatctttgccatgcaagctttcacagcatatcttccgcgatctctgcaccttagttcgtgagtgaaaatgatggcttgatcaaatgttgatctcattcgtatactgtatatatttacagtataaaggccgtcaactatgtctcttacacttatagagctgagctcactttctaatgctgactccatacctttctatgccgaattgatccaggctggattcccgtctcctacacaaggatatgataaacaagagttaaatctccatgactattgtgtaaaacacccatctgcgacttatcttttgagagtttcagggcggtctatggaggacgcaagaatacacgatggagatgtattagttgtggaccgatctcttacgcctgagcatggaagcatcgtcattgcctcattggacaacgagttcacagtaaaacgactggtattaaggccaaggccgtgcctaatgcccatgaaccctgcctacagcccaatttactttgatccgaggagaaccaacttgagatttggggtgtcgttacatttacggttatgagtcatttgctatgtacggaataattgacgtcaatgggatgtttgccagctgcgaacaagctttcagccagacctggtgaacagagctgttgcagtcttaagttcgaacgacggtaacatcattgcaaggaatcggctctgcaagttagccggtataaaaatgggcgacccttacttcaaggtaagacccctaattgagaaacacaatgtggctgtctttagttcaaatttcacgttgtacggatctatgtccgcgcggtttgcctctgtcgtagaatcattatcagccaatacagaatgttacagtgtggacgaagtttttttcactgctgataatattgaaaaggtcatgagcctggatgaatatggccatcaactgcgaaatgcagttaaattacacacaaccttagtgtgtggagttggcatatcgtattcaaaaactttagcaaaattatgcaattacgctgcgaagacatggcctgcatacggtggagttgttgcattaacagaccggcaaagaattaaaaaacttctaagcattgttgatgtttcagaagtatggggtgtgggtcgaaagatcgcaaaaacactctctttaatgggaattcatactgcgctcgacctggcccaggcagacacaaatttcatcagaaagaatttcaacgtcgttctcgagcgacagtaagggaactgcgtggagagtcatgctttgcgttacaggaacatcctgtgactaagcagcaaattgtcgtatctcgttcgtttgggcagcgagtgacgtcgttagatgaaatgcagcaggcagttacaggctatgccgcacaggcagctgaaagactgcgtggggagaatcagtattgcaaggctatcaatgtatttgttcggacaagtccattctcgataaatgacgttcagtatggaaatcaagccaccgagaagctgttgacgcctactcaggataccaagatattattacagctgctcaacgcgcactggcgcggatttggaaggatggaattaattacgctaaagccggtgtgatgcttgccgatttcaacgggcgtgaagctcagttaaacctctttgacgaatcagcgccgagagaaggagtgataattgatgggattgcttgaccgtatcaacagagatggacggaaacagctatttttgctgggcagggtattaatcctagttttaaggtgcgacgagattggctatcgcccgaatacacaacaattggaaggacataccaagagcaaaaataggatagtctcatgctttcatgctttcatgctttcatgctttcatgctttcatgctttcatgctttcatgctttcatgcattgtgaaatcatgcattaaaaggacacaaatagtgtaatgcatcaacacttgagtggccgagctccggtttacatatgcatcttacgctccctcgctcactaactcgcattgctcggtcgttcgactgcggtgagcgttagctgtagataggttacggcgtcacttcaaatttaggctcactctttagctaattataatccccgaccttataaccgctcatatcatgcctttatgttctcatttttgttcaaaaataactcgcgaaagctagtttttaagtaaattatgttgtaatgggcgtattttgctttaaggttactcttatgttctcggtatagagtgttatttgagaatttaaattctcaatgagcaaacactaagagaacgtttattctcaaatctggatttactagcgagggcactatgcgcatttttattgatgacggttctacaaatattaaaatgatgtggaaaggcgaggacggtaaagctctacccatatgagcccaaatagcttcatcacaggttggagtgtcgcgttcgggaacagtgacgcggcaaactatgagatgggcgaacgtaaatttagctttaactcaaacagtgcaaaatgcatccgcactactgaggttgaataccagtacagtgacgttaatgtaatcgcaattcatcatgctttacacacatccggcattgaaccccagcccgtagagatagtggtaacttaccattatcagaatattacgatgcggatatgcaggcaaatagggtgaatattgatcgcaagataactagcgtaacccgcgctgtagctcgtaataaagaacaagcgttcacaattacgtcagtgactgtacgccctgagtcgatgccagcaggcttcaaagatgctcagttctgaagcctaaccaatcattactaatcatcgatattggcggcacgacaacagacgtttcacaggttttaggtcaaatgaatgggattgttcagatcgagtttctgacaaacgttggcgtttcaatcgtaacctcggttgttaaagcggcgttggcaaaagcaaatactgaagcctcggattatataatcaatgaaatgatcaagaatcgtcatgacagggagtttattgacggctgtattaatgacgcaagtcaggtagataacgtaatcaaagagattcaaagtggtatcaatcaattatccgaacaggtgatggagtagtaagacgtttccacggttatactgccgttactgttgctggcggtggggctatgatttgtggtcaaaatatcaagtcatccactaatattagagacgagcgatttaatatttctaatgacccgcaatatgacgttgtacagggcctttacgatattgatatagggtgataaatggataacagaagaaaagttactttctattgaatcctgacaaaaatgtcgcagacaagcgtgtctgcgattatttggaaggggttccacttaagcaacgcggtgagtttagccgaaatgctctttttgctgatatcttattgctcaaatggagagaatttaaaagcagtgaacctattggcatcagaaaatagcgactttatggacatgcttaaaatattcaggatgttgtgccaaactttgaatcgaatactttgaatgtatctcgagttggaagaaatacacaagtatctgttagaaaattcccaggtctggccaacaacattcattgacaaagcaaaatgtttccacaagtaagacgtaacaaggaaaaacgccaaaaattattctgatttttattggaggcaaaatgggcgatttaaaagaaaatggaattatttattagatagcttggtccctacaggttctaatgaaaaaaaaatcagaaggttggttcatcgtttatgctagtaagcgcggtgtttatactgccgcttttgctctttaatccaccaatttgggtaaggttgttctaacagttactctatgtcttatgccttattattgggcttgtgtcatgaaaaagcttgagagccgtgaaaaaatatagatttttttgggcgcatgaaatgtatatgatgtttctaacatgtctcaataaggaaacagaatgagtgcgccgtcaataagtgaagtgaacggataagacacaagcttaatctaacacagtccaaatggctcagctcctagtataaccctccgtgcctatcagacgtgaagatgtcatgaaaacacgcaaaactgaatttgaaatgctccaactccttgcaggagaacatgatctctatgtagtgtcttcaaagacccttcaaagtcacctattgaggctgggtcatggatgattccacacatgaggaacttagggcaatacgtgagattttaggtctgaccatcgctcagatggcagaactgacgggttatgccagatccggatggaatacaaagaactgcctgatcagcatactgtgcgcccaggtgagtataactatctaatgctattactaataaacaccctaatctctatatttatgatcgagaataaatctgggaaatacgaagggtacatgagtataggagttatctatcattccatattatagtcatgtatttttcgtgaagtaaggctagatgaatatctggacataataaaatgcatcgttcaacagtatgtttataaccccatacaccaagaaccttaaaatctaaatttatcaatataatccgttaaatttcaaaataatcgtgtgttaaaataaacaccttgcatgatgtcgtaaatgggcgtattattcgtttaaggaaacgaatttgttttcttatttcccggaaggggttatgccggtttcggctgtattaaggagttagtcatgcatgctatgcaacaagaacttttttctgaacctgtaaaatcatctaactttattccaggtaataccggccaattacgtaaagaattttgttcattattgagtgatatatctcgccagaacggtactcgtattttcgatgtgtttcgtgacttcatttctctcgcagctagagagttagatgctgtccgaatcagaacggataaaaacattaaggagtcaaaagtaatttgtgataaatatactgctagtgatattgattcatttcatcggctttttattatcatggtagaggcacttaatactgagttccacgattttctaggaatggtgttcatgaactggatttcggtaatgattttaggggcagttttactccggaccatctttcaaataccttggccagtttattgataggaatgagtttgatgcgttagtcaaaaaacccattatcacactcggggaacctgcatgtggcgctggcggtatggtgattgcctttgccaagcagcttatagagtgcagggtgaatatatcccaacgattgttcgtcagttgcattgatattgatccgttgctacagatatgtgttttgtgcagctttctttacttggaattagtgcggaagtgacgacaggtaatacattgtctatgcaattgggtctaagcagaaaaacacctgtttatttgctgaaaactgggaagaaaataactttatagggaaagagtattatgtaaattaaatatccatctcgccttcttagttatttactaacatatcgataggctcgaaacgagaactcaataattaaactatataaattgaaagtataaaatggaaataaatattattatatacagttattcatgcgtgattattgtcagctggatatcttgggcaatacatcttagaaaatcttcccaacttcaaaaactgtgggattctaatagttgtcaatacatgctggatcttgaagaagttggttatgtaaacaatttaaaaacagaactatccctagaaaaaaagttaaacgcaactttatactttccttgtttttcaccgtgaatggtattgtattgtttattttgaatcattcaggcattataaatagatgctaggttattgataagtggtagtattaatccttaccacttttgttccttcccccttctgctggactgaacactgtgagcgatacattatatctgatatgttgtatgaattggtgaaggcttcgaaaaagcagtactcaacttcatttttaacttcttaggtttctgaaaataatagttttttgttcattgctgcaatagatgtaattaaatatcgtcatttactcgataaatttcactagcactccaccttcgtgtcttatatgatatcaatatcaccctaagataggtgagcaacaaataaggagtagatatggaagatgataaactagcaggcgcgattcgtgacttttataatttgttcagcaaacacgtgacagacttgaaaaacccaaataaatgtagcacagcacaattgaaaagactcgagactccattaaataagagttacgatatcatcggtaacatcttgttcaaatagaattttattccagacaatgacgccgcaggaaaatgaagcatcgcttcataattttcgaccttcttttcccgacgtgtcaggacatggcggtagcgattcatccaactgtacgtt

SEQ ID NO: 11 - DNA, 4929777 bp, Rouxiella (residues 1-1,643,259 of 4,929,777)
ccagtcgtcgtcccctgaaaggaggtggtcaggttctacctttaaaaccggctgcgcagtggccatatttttatcctttaattaaagagaagttgaacgggcagagactttgacttcaggggtaaaggtgaaatctttatcgaacggaaaagtcggcaccgttttacgctttcgcggcagtcgctcacgaactgatcgaccacgccgtcggagagcgccatcagattaggtcgcgcaatcggcgccagctcaggagacagatagccggatttcaccacgacgacgttggcctgctgcgggtcgaggccgagctgcgtaaagtcggcaatatggtgataaggcctgcggcgagcggagaccaccacgtcgatgccgttgacgtgcagcaccgcctcgttcagcctggttcggtgcatctagcaaacgcagcacggtaaattcggcgtgcacctgcggactggacggatcgagagagcacccacggaacgttatgcgcgcgtcgacgcccgcctcgaaggcggcctcggtcgcaggctggtcgtaataccggcaacaatgacgccgtcgcgccctgtttgagtaactcggccagaaggtcggcgcggtcgcctacgccacgccggtgggattatcgccagaatcggccagcaccaccgggtgcgtctggctgcaatagcgtcgcgcacgcaggcttctggcatgtccgttttgcagccaaagacaaagtcttcacgcgcgtcccaatacgcctgcgccagtttgatggcctcgcgttcaagcagcgggcgatcggtaccggtaaaaatagccgccgccgtggcacgcggctcgtcggcccaaacgtagccgaccatcagcgagctatcccacacgccctcaatctggtcgagcgcgggcagacaggcatagagacttttcgccggttcatcctcggtactggtccgttcgccggcagcacgaccgggattggcacccaaagcagggtcggcctgacgccggtttgcaggctcttgaccagcatggaaatcgaacggcgcatggtctcttcgacgtcgatgtgcggcgcggtacggtaggtcgaaaacaggtcgatggcgtcgatgattttctgtgaaacgttgccgtgcaggtcatagctgacgctaatcggaatatcaggcccgacgacctcgcgcgcggcgctaatccagtcaccctcgcgtcttccatgccctcgacgtacatcgcaccgtgcatcgccagataaacgccgtcgtagggtttgtgcgcctcgagccctgccagcatctccgccttgaacgcgtcgtaggtggcgcgggataccggccctccggcgatggcccggcatgaaccgggtaaaaaggtcgcaggatagtcctgcagaaaggcaaaatacggtgccgccagcaacgcatcgttgcgcaccacgcggaaatctttttcttcattaagaacaggattataagtgctgcattcgatatgaataccgccaacggctatacgcatcttctacctctacgggttgtcagggcatcaagaaaacgatgggccgcaatgcttgccgctgcacgcacccaggtatcttcatcgatggggaaattctcaccggcgtcaatccggcaaaaccgggcaatacgttagtttcgatcgactgctgtaccaccgtgccgagcagcccgccgaaggcaccgcctgatgggcaatgagtatcaggctgggtcgagaatctggatcagctgggcgatagccagtcccagccgtgcctgcacggtgcaggatgcggatagccgccgccgaaccgccggacgcctgctccagctcccagactgctcaggccaagattttcttcgcgcgccatctccatggcattcagcgaggcgatggtgtcgagacagccgcgcttgccgcagcggcacggtgtcccgtttagctccagcgtgcagtgggcaatctccccgcgccgcgtgcagacctcggtgcagcctgccggcaataaaatgcgctgccaatgccagcgccgtggctgaccagcgtaaaggtgtcgaggtctcgcgcttgcccaaagcgtttttcactgaccgccaacgccttggcgtcattttcgataaacacctcaaggccggtagccgccgcgaccagacttgccagcggcacatcgcgccagcccaacagcgccgattgcacacaggttgactggttttcatcaataaaaccggagagcgtgacccccatgccaatgagtcttgcggcagcgtcagtgtgcccttccaacaagtcgggtaacgtgggcgatgttgcgccagcgcctcaggctctcgagaaagcgtgaaaccggcgcgggctataatttcaccttgtaaattaattagcgccatcttcgccggcgtttgcagcagcgaaacgccgatgaaataagccccttcgggccgcagcatcagcctgacggatggccgccctgccccggcccgttaacggtttctgactcatgcaaatagcccgcgtcgatcatctccctgaccacgcacctatggctgccttgctcatgccgcacacctgcgccagttcggtacggctcagccctgcggcagagttgatcgcccctaatatttgccgttgtagtgaactcagcattccgttttcgcgctcatttttggctaatctgccttgacattaaacttataaaatgaatatatcaatgccaattagttcacaaaatttactaaataatgaaacataagcatttcatatgaaataaatacccagagattgtagaaaatgccacaaaggcaattttcgccattaccgcaacattggcagaggaaaatctatgaaaggtttcaaaccatcggctgtccgggacgtttaacgttgcttggctgtgcgctgctcggcgcactggcttccccgcgtactcagccacgttgacggtgatgcaaaacgaggcgccgcgcagcatggatccgggcaaccagaccgcaaccttcacggccacggtgttggatccgatgtacgaagggctgctgaaaatgtcgccgcgctgaagctcgaaccggcgctcgcgacctcgtggagcagcgacgccagtgggctggtatggacctttacgctgcgcagcggcgtaacgtttcacgacggcacgccgtttaacgccgacgcagtcgtctccaactttgccgccatctggacgtgaaacgcggtctggcggctagcggtcgtctgcgcacctttatcgacagcgtcaccaaggtcgatgaccgcacggtggtgttcaaactgaagaaaccctacccggcgtttctgaatctgctgaccaccggagcttgcctgatggtcagcccgacgccgacaaggccggtacactggacagcaaagcggtaggcaccggccctacaagatggtgcagtacaagaccggtgaatacgtgctggaagagaaaaatccgggctactggggcaagtcagacggcccgaagacatcaaatggacctggagttcggagtcttcggtcatgaatatggcgctgcaggcgggtgaagccgacgttatcaatcccgttccgccgcagttcgcccgcatgctgaaaaacaaccctaaattcgtattgcatgaaagcccaggggcgtcagtgttctgggtcgcgctgaatacccagttaaaaccgctggacgacgtgcgcgtccgccaggcgcttaacttcgcgaccgaccgcgatgggctggtgcgccatcatgtctggtttcgccacacggccaactcccgctggcacccatcactcccggttatgacaaatcgcttaacccttacccactgaatatcgagaaagccaaggcactgctaaaagaggccgggtatgccaacgtttctcaatgtctatcgccgtacagggcgcagacgcgcgtattggtcaggtgctgcaaagcatgtgggccaaaattggcgtgaagcttgacgtgcgtcagatggaaagcggcgtctggaccaaagccgctttcgccgatccggccggtaaaaaagccgacggcaccggcgctattctggcctcctggtcttccggcgtcagcgggccgacttgcagctacgaccgctttattactcgggcagctttgcgccaaccggggccaacctcgggttcttcagcgatgccaaactcgacaagctacttgataccgcggcctctacgctggacgaaaacgcccgcaatcagctctacgtgcaggcccagcaggagattaacctacaggcgctcagtgctgctgtattaccagaacgatctttatgccaccgggccaacatctccaacgtctggatgatccccggtggaaacgtgatagtcaaagacgcccataaacagtaggaagcggcatgaaagcctatctagccaaaaaactgctggcctttccgatcattctgattggcgtatcgctgctgatttttgtgtcgatccgcgcactgccggggatccggcgcgcatgatggctggccccgaggcgacgcaggaggccgtcgatcatatgcgtacgcgccttgggcctgccgctggtcacccagtatgcgcatttcgcccgcgacgtgctgcacggcaatctcgggctttcgctccagtcgcagcagccggtcacccaggagattggcgagcggctgccctacacgctggcgctggcggtgctggcctattttctggcgattgtgattggggttccggcgggcatgatggggcgatttaccgcaaccgctggcccgattatggcgtgatgctgttggctattgcgggtgcgtcggtggcgaacttctggctggggctgatggcgatgaacaccttctcggtggagctcggctggctaccgctgctcggtgcatcgtcatggaaaagctacattctgccgtcgtcacgctggcggtttttgccgatggcggtgatggcaaggatgacccgttcgagcatgccgacgtgctttccgaggactatatccgcaccgcgcgggcaaagggctgtcggcgatgagcatctactgtagccatgcgtttcgcaatgcgcttatcccgatgtcaccattgtggcgctgaacttcggcagcctggtcggtggcgcggtggtcaccgagtcggtattcaactggccggcattgcgactgttggtcgactcggtgcgctatcgcgattatccgtcattcagggcgtccgctggtcgcggtctgcgcgtggttatcatgaacctgctcggtgaactgctgatagccctgctcaacccgaaaataaggtttgaatgatgagcaccctaaccgcactctctcgcgcaaaaaagccgaactgcccaggtgtttcgctggttatggcgtcatgctggcatcaccttggcgcgcaatcattgccgctatcgtcatcgcccggactgcttgcaccctggataaccggccacgacccctacactcaggatctgctcaatacctgctttcccctcggctgaccatctgttcggcaccgacgactatggacgcgacatcttcgcccgggtgatttacggcgcgcgtatctcgattgtcgaggtggtgctgacgtgggctggcgatgctgattggcatcccgctcggcgtcatttcgggatggccggtcgctacattgacctggtaattatgtggtgatggacatgctgtttgcgtttcccggtatcgttctggcgattctggtgtcagcattctgggcggcggtctgattaatctgctatcgctatttctttgttttgccattccggtttatgcacggctaagccgtaacctgacgctcggcctcaagcgcatggaatacgtagaggcagcgcaggcgctgggcctgtcgtggtatcgcatcgtggtgcactacattttgcgcaatgccgttgggcctatcatcgtgcagtcgacgctgaccgccggaaccgtcattctcgccgccgccagcctgtcatttctcggcctcggcgtgcagccgcccatgctgaatggggtacaatgatgagtgatggtcgaactttctcggcattaatatctatctctcgctgttcccgggtctggcaatcatgctgaccgtgccggttttaacgtactgggcgatgggctgcgcgacttactggacaagcgttcatgatggtaaacacagcactgcggttttttgtgccgatatcggcggttcatttatcaaatttggcctctcccgccagcagggcgaggttaccgtattagcgaaggtcgccaccccaacccagtcctgggacgagttttgtgctggcgatgcagatgctgctgaacgagcacggcgcagaggttgctgcggatgccccgttggccatctcgactgccggactggtttcgccacagtccggtgaggtaatggcgaccaatattccgagctttgccgggcacaatcttgccgccgaactcacgcaaatactcaaacgcaaagtcagcgtggcgaatgacgccgactgctttgcgctgccgaggcgcacgtcggcgaaggtctgggactgccgattgtagtcgcattattctcggcacggcgtcgcggcgggctggtatttaacggacaactggtgcgcggccacggcggcgtcaccggtgaatggggtcatgggcgattacccgcaccgagctgctgctggacaacaattggtcagagtgcctcgtctgcttgggttgcggtcagagcggatgcttgacatgctcggcggcgcccgtggcatcgagcgcctgcatttcgagctgcaccagcaaacgctgaccagtcatcagattatcgagggctggcaggcgggaagctttcaggcggtgcagaccctcaacgcatggctggcgctggtaagcgaacctcttaccctgatggtcaacattctcggggcaacccgcgtggtggtcgcggcggactgccagcgtcatccgctgattgccgcgctcgaccagcgagtgcgtgagtctacgctgcacaagtatccgcagccgctggtggtccccggaaaattcgtgaatcaggcgggctggtcggtgcctcggttttaggccgtcagcgctgagtcaaaacgcatcgtcacacggctggccgaccttattcaacgcgttgattatcccacgcgcagctcggccagcgcccgctctttctcttcaatctgtaccagcttgcgttgcagctggccttcttctgttcgacagaaaattggctgtcaacccagaccgcaagtacctcggcgatttcactgagcgtgaagcccaacatttttgcatgcttgatcatcttcagccgctgcaggtcaaccgccgaatagactttatagttgttgctgccgttaggctgtgaggcctgttcgagcagccctgccgtcgtagtaacgtaccgtatcgcgcgggacgccagctttggcacacaactctccaatgcgcatcgttcagctctccgatgaaaggttaaaatggacttgaccgtagacctaagtccacggtttatcctgtttgcagcataacctcaaacaggaaaacgggcatgaaatctttcaattattcagaaaaaacggcgctcattactggagcatcctcagggattgggctggaatttgccgaacagcttgccgctcgtggcgtgagtctcgttctggttgcgcggacccagaacaagctgcaagcgctggccaacaggctgacgcagcagcatggcgtgacaacgcgggtgattgcacaagatctcagcgccgtggacgccactgccaccatcatgggtcaactgcatgaagccaaaattttccccgacattctgatcaataacgccggttttgccacctacggcgtgttcgatgcgctttctctggaccgccaacgcgaagagattcaactcaactgcctgtcgccgattgaactgacccacgccctgctgcccgccatgctaaaacgcggcgacggcgctgttatcaacgtggcatccactgcgccatccagcccgatccctacatggcaatctatggcgcgaccaaagcctttttattgtcattctccgaggcgctgtgggccgagaaccgtcaacgcggcgtgcgtgctggcgctgtgtcccggcgcaacggatacggcattttcgatgtagtgaacgctgaagaggcctcggtaggaaaaggatgaaggccgatgcggtggtcagtcaggcgctaaaggcgctggataaacagcgtaactacctgataaccggctgcaacaactggctgcttggccagctgcaaagatttgtgacccgtcggcgactgctgattatcgccgagggtatcttgaggcctaaggctcaacggtgaagggccactcttcgactcaagacagagtggctttcgacaggatcagttcaagtcgtaaaagcagtcggcgtccagcgtgacgtcggcgattttctgcaccgggccgcgcatattaaccataaagtctcccgagaaggagatagccagctgaccgcccggcatggtgacagtgacgcggtcatccaccaacccagtttgcgcatcgcactggctgcggcacagctgctactgccagatgctagcgtgtaacccgctccgcgctcccagataccgatgctgatattttgacggtcgataacctcgacaaactgcacgttggtgcgttttgggaaaattgccagcgtttcgatttccgcgcccaattgatgaacagggctaaatcgagtttttcgacgcgaataacgcagtgcggattgcccatcgagaccagcgtcgcgttcaagtcatgcccgcaaccaccagcggctggtcgagcatgtgctctccttcaacgtgtgcaggtagcgcagaggggtaaatttcgcctgccccatatcgacgatcacctgatgcgcgccttctgtcacctcacaggtcacctgcccacccaacgtattcaccaggaaaggctcatgaccgactcttttatatcaaacagatagcgcgcataaatacgcagaccgttgccgctcttctctgcttcggaaccatcgggattgatgatacgtacgcgcggcacgtcctcatcatcgatatcaatcagtaaaccgtcggagccgataccgtaattgcggtcgcaaattcggccgatctgttcgagagaaaattgtgcagccacgctttggttacaaaccagatagtcgttgcccaaaccgtgataacgatgaaagagagaggaatgcatagtcagctctgttgtgttcgtgaagaaataaatgaagcgttttggtttctataaagaatacaccagcgttaactcgtgctgcatgaaaaaatggcgttttagaaatcgtttagcgtcgacagcacgcggagtatgagcggtttggtttcattctttctccagacagcgtggatagacacctcgagcgggaaccagggcagttcggcaatttccacgttggcagagcggatacgcgccagacttttttgtataaaggtgaaccccagccggcctctacgcaggacagcgcggccaaagggccagtgacttcaagtcggatattcggggtaaaaccgctcaccgcacaggcgtgcagcagccgaatacgcgctgccgggtttaggcctccggtcggcaatccagggctgcctgtcgagggtttcaggcgtcggcagcaataagcgcttgttaacgggcatcgctaacacaatgggttccgaaaaaacctttctctgctcgaattcatcgctttcttcgggaggcgtgtgcagcagtgcgagatctatcgttctgtcgcgtaggctttcaatttgctgcttagagcggaaggcatgcagatggatatcaacatccggtgaacaatcaagccgtgccagcgtctcaggcagaagcctggaatgaatcgccgcttcgacgtagccgatatcaagcctgccggcgagacctttgcccagatttttccctctgtccttcaacctgtcgtgatgctttaagaacgcccgaacctcgccaagaaaatcctttccttccgacgtcagccgcaagcgctttttctcccggtggaagagttcaacaccgagctcatcctcaagcagttgtatttgcctgctcaaaggcgaggaggagatgtgcagtttttctgcggcctgcccgatatgttcaagctcaccaacgacggcaaaagatcggagtattcttatatccacaacaatttaggtcccaagtgtgccaaaaaatattatagctgatactcgcgcttaacaccatgatgtactaccgccaacacattgaatttaatcaagttggtcagcgagaatttttcagtacgtccaatcagaaaaaattgcgcctgaaattgggaccgttcccattttagtcgctcataacgtaagggtgatgttagcaatgttaagtataaatgacattcgtgttgagtgtgggaaccaggaaggcccgagagccatcatgctttctccgatgatggcacagtgggacggcggcgctttctgccaacctcttctagattggctggccaatgctggctacagcgttgcagtctacgataccgttggcctgtgtaagggcacaaaagatctgcatgaagccaccgcagtctggggtgagtttctgctcgaacatgaacccaatatcgacttgctgatagggcaggcttacggcggcgcaatcgctcagcatctcctcgccaacgagcttgcttatgtttccaaatttattggcatctcggcgccgacttattgcgacagtctgctgcgtgaaaaactaaatggggtgcttatcgatctgaacgaaatctctgcggaagcgggcctgaaaaaactcctttggtgcattcgcccagataccgatgacacctcccgcaagtcgaaggtcaagccccggcaggtactgttgaaagactggcgaccggcttaaagcagcttcaaagcgcagatgcacgtcatattatcgccgattatcagggcagcgccctctggatttatggcagtcattccagactcgttaatacagtcaacatcgttcctgctcagggtcgcagcgaccatcaaagcgtaaaactgcctcattgtggcatgcatcctttccgtgacgttccgcttgaggccattaaggccgtggaaacgtttttgcaggaggccatgtaatgaaaaaagttctcgtgcttcccggcgatggcgtgggtgccgaagtttgtcatgcagcgctgcccgtattcacgctgctgaatttaccgattaccctcgagtttgctcaaatcggctggcagtgctggcaacaaagtgcccagcccattccggcccagacgtgggaaaaaattacccagtctgacgccgtactgttgggtgcaataaccagcaaaggcaaacaggatgccgaagcagagttgaccccggcacttcagggacaaggccataaatacgtatcaccgttaatcgagatgcgtcaaaaactcgaactttttgccaatgtcaggccggtttacagcatcaaacctgggcaacgccccttccgctgcgtcgttttacgtgaaaataccgaggggctttactgtggtctggaccgtcgtggtattcccgaggagtatcgcagctgggttacgcacaccaacattgaccgttcagggcatcaagatgtcgccatgagcgtgcgaatcgtgacgcgctttggcatggcacgaatcatccgttatgcctttgaatacgccaaaaccaataactatccaagcgtcacttatgcggacaaacccaacgtgcttcgtgaaagcggccagtttgccagcgatattttttgggagattgcagcagagtacccggacattcacgccgaaattcacaacgcggatgccgttgcgctttggctggtacagcgacctgaacggttcggggttattgtcgccgaaaatatgtacggtgatattctttccgatctcgcagcaggcgtgatgggcggtctgggaatagccctagcgccaacattggcgccgagacgccttattttgaacccgttcacggcagcgcgccgcgcatggcgaataggggtaaagcgaatccgcgcgatgttcctcaccattggcctgatgcttgagcacttgggttttggcaacgaagcagaaaaagtcaaacgtgcggtcacctgggttatccagtctggcgatacgctcacctatgaccttggcggcaacgctacaacacagcaaatggccgataaaatccttgaatatatccaaaacgctgaaggcaatgagcagggcaatgtccttgctggcctggttgaagatttggcagaggcctgaaaatgagtcatgactttataacctattggcgagatagaatttcgtttctcgacgttcattatcacgtttctcctgacacctttattcgccggcataacgtaattacggcgggcgaaatctacaaaaatctcggcggtgccgtggttctcaaaaatcatctcggcgatagcgtttccatggccgaaacggcaaggctttgtgggctgccggtcatgggttcggtggtgctcaatcaggtggccggtgggccaacctggaggagcgttgaagagtccttgtgcaaaaggcaggccgaacacagcggaagaatgattattcatctgccgacggtaaccgccgtgcaaaacaaaaataaggttgatcggacgctggccaacgactattgcgccaaagcacgctcgcagggtgtttcaataagtgatgaaaacggcgcattacataaggacgtcatcgaaatcctgcacctggcgcgcgacaatccagtggttatttcgagcgggcatacctcccgcgcggaaacgctgacgcttatcgagatggcggaaagaatcggcgttcctcgcctgatgctcaaccaaccggccaatccgatgacaggcctgtcggcgcaggatctcgtcaatctctcaggcgcggactggctgtttatcgaacagaccgccctcacctatctgctcggctggcagacctgggaagactatagccgcgttctcagcgaagtgccgaacgttgtatacagttcggatcttggccagaccagccaaatcgatcttcctgaatggtatgaccaaagcctgaagtggttcgaagaaatgaacctgtcagaggcacgtagaaatgccatctggctggacaatcccctgaaaatgctgagcccctagctaaaatagccgccgtgttaatgcccaataacggcggcaacacttatagagaataaatatgaaagaagtcataaggaatcgtttcctgctaatgtgcgccgtggtgatgatgctggtgctcagtctcttttcgagcgacattttcctgcccgccctgcctgacattgtccgccaatttggtgtgacccgagtcagggccaacagatgctgggacactttcttctcggtgtcgcactgatgcagctggtttatggtccactgtctgacagtctggggcgtaagaagctgctgattttcgggacgagcctgtttatccttgcgacctttgccatcatctacgcccccaattttaaggatctgctggccttcgtttggcgcaggccgttggcgcaagcgcgagtatcgtgctcgggcgcgcaattattggtgacctgtttagcaaagaggaagccggtaaaatcttcctgactcttttccccatcgtgggtatgtctccggctttggcaccgatgattggcgggcaaatcagcaatctttttggctggcatgcgtgcttcattttcgccgggctttttggcgtagtgctgctgtttctgacgctgaccgcggttcccgaaacgctccccagggaaaaacgcaatccactgtccgccgttgatgtgatgcagggatatatcgccctgctgctgtcgcgccgcttctggcactatgcgttgatcccctgcattgcctatgccgttttttatgcctatatcgccgagtctccttttttactcctaaagcaaggcgtatcaaataaagtcataggctttacctacctgagtctctcgctgacctatgtcaccggcaacctcatcgcgcgctggacaatgtcaaaagggctaacgctggataaggcgttggcgacggttacctggtttttgtggcaggcggcattgtgatgtttctgaccacccattttgcccctaatttctatatcggttccattaccgcgatatcaatcatgacattaggaaacggatttttgcttcctttaggtactagcggcgcagtcaccgccgtaccccataatgccggttcagcctctggcctgatgggtgcgatgcagattggggctgccgccatcattgccggcattatcgggccgctctcaggccataatccgcaaacctttgggatgatagtttttgtgctcgcgattgccggtttcttcattttccagaccacccgtcggctgagttatcgcgctgaccttaacaggcagctgtcctaaaaagtaattcagttcaaataatggccgcaaacgcggccttatataaacaataaaaatgtgaccgtaaggcactttaagatgatggcagcggctttaaactttctgattaatattctgagcgaatgatggtctttttaaacatttattttaatctttcaacccccagttttaagctgaaaatacgcattaacttttagacacgcgaaaacatcaatataaataaaaatcatacctccataacgattttatggcagacattgtgcttttcagccctaacgtggttgaacggacacaatattcatacagcacaagatattgtttaatatataaaattatttttataagccgtcactctctgcatggatgcatcgatataaaaacgagaatatttttgaaagttttaatccgatcacatattaataaaaaaaatagagagcgtacccatgagtcagaacagtattgtcgatgtaaaagcctggatagattctcgatctatttcgggttatcaatggctgattttatcactgtgtttcatcattattatgtttgacggctatgacgccgcagtgatgggctttattgcaccggcactcatggatgattggggtatgggtcgaggtgcaatggggccaattctcggcgcggccatgtttggcgtcgccatcggcgcactggttgccggtccttatgccgaccgcttcggaagaaaacgcattctgctgatttccatcctgtgctttgcggtgtttagcatgatgagcaccttcgctcgcacgccgatggaaatgggtattctccgcttcctgaccggcttaggtctgggtgccgtcatgcctaataccgtcacgctggtttccgaatacatgccggaacgccgccgcagcctgatgataaccgtgatgtacagcggctttaacatcggctccggactcggtgggtttattgcagcaggtctgctgccgcactttggctggaaatcggtgctgttcctcggcggtatcgtgccgctcgttatgctgcctgtgctgctgtggatcctgcctgaatctgcgatgtacatggtagtgcgcaacgttgccaaagagaagattgaaaaagtactgcgtcgtgcaggcgggtattctcaagcgaaaccaaatttgttcttaaagcgcccgttatccagcagaaagccaaggtgttccagctgttcactcaaggctacgcgaaaggcacgctggtgctgtggttaacctattttatgggcctgttcgttatctatctgctgaacggctggctaccaacgattatgcgtaacagtgggttcacgatggagcgtgccgctatcgtcgccggtcttttccagctcggcggcacctttggtggcctgatggtcggcggactgatggaccgtttcaaagcgcgtcgcgtcattgccctgttctatctcatcggcatgacctgcctgctgtcgcagggcatcggtaactttggtgccaacacgctggcggtcttggtgttctttagcggcgtatgtattaacggcgcacagactggattgcaggctttctctccggcattttatccgaccgagatgcgtgcaaccggcgtttgctggatgcacggcgtaggccgcaccggggcgattatcagctcgtccaccggcggtattttgcttggcctgttctcgggtcaaaacgtgattttcctggttctggccgtcccggcgctgttggctggcctgagtattttgatgcaccgtgcggcgcatccggtcgaaatgatcaaaggtatcgaccttaatgatattccggagctgtcacgcaccatgaatgttcgttaatctttgataaaagattcattgattgaaatttttgaaggaaaattccttctacccttttaactgatgcagtagaggcaaacagtatggctagaattatcggcggattggcggtatctcataccccaaccattggttttgcggttgaccacaacaagcaaaatgaaagcgcttggtcgcctatctttgaaagctttgctcccatgcaaaaatggctggacgagaaaaaaccagacgtactgatctatgtgtttaacgaccatgtcacctctttcttcttcgatcactattctgccttcacgctgggcattgatgatagctatgaagtggcggacgaaggcggtggcccgcgcgatattcctgccgtaaaaggccacgccgcactgtcgcagcacatcggtgcaagcctgatggccgatgagttcgatatgtcattctttatggacaaaccgctggatcacggcctgttctctccgctgtcggcgctaatgccgcacacggaaaacggatggccgacgcagattgttcccctacagattggcgtgttgcagttccctattccgaccgcgcgccgctgctataagctgggccaggcactgcgccgcgcggtagaaagcttcccggaagacctgaaagtggcaatcgttgccaccggcggcgtatctcaccaggttcacggcgagcgttgcggatttaacaatccagagtgggacgagcagtttgttgacatgctggttaacgatccggaacgtctgaccgaaatgaccatcgccgaatacgcgacgctgagcggcatggaaggttcggaagagatcatgtggttggtcatgcgtggcgcactgtctgccaacgtcgagaaactgcaccatgcgtactatctgccgtcgatgacggggattgcaaccctggtgctcgagaacaaatctcgcgaagccccggtcgacgtgcaccagcgtcagcgcgacaaaattgccctgcaaatggccggcgttgagaagcttgaaggcacctatccgtttacccaggcgcgtagcctgaaagcgttacgtatcaaccgtttcctgcatcgtctgattcagcctgcgtggcgtgagcgcttcctgagcgaacagcaggcgatgtttgatgaaaacaaactgacaaccgatgaacaatcgatgatccgcagcctcgactggtgttcaatgattcagtacggtgtcagcttcttcctgctggagaaactgggtgcagtggtcggcgtatctaacctgcacatttactctgctatgcgcggccagacgctggaagagttccagaaaacacgtaaccagcaggttctttattctgttgcggggaaagccaaggcatgagtattttcgaccagcctaaaatagacacgcaccaccacgtttttgatccgatcaattttccctatattgcggatacggcttatcgcccagaggggcatgagattggtacggtggaatattatcagtcggtgatgcaggcctataacatccgtcattcgctgatagtggggccaacttccggctataacaccgacagtcgctgtctgctggacgcccttgaaaaaggcaatggccgttttcgcggtattgcggtggtgccttttgacagcagccttgaaaggctagccgaattgaaacaggccggcgtcgtcggtatcgcacttaatgtcgcgatgctcggagtcgatccttttatcgccttcgacgatatgatgggcaaacttgccgagctcaacatgtttgccgccattcaggttcaggatgaccagcttttggcgttgatgcccatgctggcgcgcagcagaaccaaactgctgtttgaccactctggtcgccctgatgtgagcgcaggtttgcagcaaccggccttccagtcgctgctctcgctcggcgacagcggccgctgctgggtcaaactgtctggattgtccaagttcagccgtcagcccttcccttacggcgacggtcatgcctatcagcacgcgctgcttgaggcatttggtgctgaccagtgcatgtggggttctgactggccgttcctgcgcgccgagcaccgtatggacctgggcacgttattgatgctggtagagcgtcttttccctgatgaaaatacgcagagaaaaatcatgtgggaaacgccgaaaaggctgtttggatttaaggattaaggaaaaagaatgcagcgtaaaattgtggtactgaacggatgtaatctcaacctgctcggcactcgcgagcctgaaacttacggtcgcgatactctggccgacatcgaagcactctgccgcaagacgggtgaagaatgtgaggtggagattgagttcttccagaccaactttgaaggtgaaatgattgagaagattcagtcatgccgtggcaacaccagcgcactggtgctcaacgccgccgcctggacccatacctcggtggcgattcgtgatgccgtgaccgctattgatgtgccgctgtttgaggtgcatatcaccaacgttcacaagcgtgatgcgttccgccatcactccttcctgtccgatgtgtcagtgggtgttatttgtggttttggtattcagggttacgaatacgcgatcagaaaagccgctttactcactaaaagttaatcaagatcaataaaaagccaatcttcgttaacaacaattgaacatccgtcccgagaggcgtacacctgacctgagctcccgcaacggcaaagagcatgagaactctttgcactgcgcgtagcacctgaacaagagactcattcttaacagaggacaggctgtatgtctaaccatggaaaagtagctttggtaacgggtggcggccagggtatcggccgtgcaattgcactgcgtttggcgaaagacggttttgcggtcgccgttgtcgacttcaacggcgaaaccgctaaaaaggtagcagaagaaatcaatcaatccggtggcagagcgattgctcaactggcggatgtctcggatcgcgatcaggtattctctgcggtggaagccgcaaaacagcagttgggcggctttgacgtcatcgtcaataatgcgggcatcgcccccaccaccctaattgaagatattacgcctgaaatcgtcgacaaagtttataacatcaacgtcaaaggcgttatctggggcattcaggcggcggttagcgcgtttaaatccctcggacacggtggaaaaatcatcaacgcctgctctcaggcgggccacgtcgggaatcccgaactcgccatctacagctcaagcaaatttgccgtgcgcggcctgacccaaacggcagcacgcgacttggctccgctcggcattaccgtcaacggctactgccccggcattgtgaaaacgccgatgtgggaagagatcgaccgtcaggtgtctaaagcggcaggaaaacctgttggctacggaacgcaggagtttgcgaaaaacatcaccctcaaacgcctttccgaaccggaagacgtggctggctgcgtgtcctatctcgccggtcctgactccgactacatgaccggccagtcgctgcttatcgacggtggcatggtctttaactgattaatgctcgcctgtgagcctgtctgccgttgcggcaggcaggcttttttagggcgtttaaaggctttcccgcaataaaaatggcgttatcagcgcacaaaaatcctcgggacactcctcggtaataaaatgcccgcagtcgcttaccatcgcgctttcaagcattggtgcgaccttctgcatcgtctcaaacggcgcattgcgcgtcgcatgggaggctccgatggccagaaccggcatggctaacggcgtcaatgcgcgtttctgattctggcgaatcgttttcggaatggcacgataatagttaaatccggcgtgtagcctgcccggcgcgctgtaggccttaacgtactcctccgccgccaccctgttacgttgccacgaccatttatcaaagatatagcccagatactgcgcctcgcgcccctgagtcagcgcctcgggtaaatcggccagctggttgaacatgaaatgccacaggaacaaattctcttcaccactgacgaagatttcaggtgcgggcgctaatccgggaataaccgcctcagtcagcaccattcgttgcaccgcatcaggaaagtcagcccccattgcgtaccctacccacatgccgatatcgtgaccgatgagtgagtaacgcgcgtgaccgagatgctgcatcagctgattgagcagcgcggcaatattgccggtatcgtacccgccacacggcgggctcgactcaccggtgccgggagagtcgacggcgacggcagtgaatcccgcctgcgcgaggtgtttcattacgtcgcgccacgtataccaggtctgcggccagccgggaatcaacagcaccgcagggcctcgcccttgcgtcacgtagtgcagacggcgatgacccaccgtcaaatagtgatgctgtttggctgcctgttgtgcacaaaaatagtcttgagtttccatgctttacgccttctgtccgtttatgcccaacagctgttgcagctgcttaacgctcaccggtgcggcggcaaagtcatcgaacactttttccgttacatgaaggatatgttggcgaataaattcagcgccttcgcgtgcaccatcgtattgatttttcaaacagcattcccactcaagcgtcgcccacccggcatagtcgttttgcgctaatttgctgaaaatacctttgaaatcaacctgaccgtcgcccgttgaacggaagcgacccgcgcgattgatccatgactggtagccgccgtacatcccttgacggccgcttggcgtgaattcagcatccttaacgtgaaacatgcggataacgtctttgtagatatccaggtaatccagatagttaagctgttgaagcacaaaatgactggggtcaaaaaggatgttgcaacgcgggtggttaccggtccgctcaaggaacatttcaaatgacacgccgtcatgcaggtcttcaccgggatgaatttcataacacagattaacgccctgctggtcacaggcgtcgagcaccggtaaccagcggcgagtcaattcgtcaaatgccgcttcaaccaacccttccgggcgctgcgggaaaggaaagatatacggccacgccagcgagcctgagaaggtgcccatctcggtcaatccgaggcgtgacgaagctttggcggcggccaaaagctgccctttcgcccattcggttctcgcagccggatttccgcgcagcgacgcgggcgccaggttgtcacacagcgattcataggcaggatgaacggccatcagctggccaaaaatatgcgtcgtcaattcgctaatgatcagtccctcttccgccagcatgccacggatatcgtcacaatagctctggctttcggcagcgacgttgacgtcaaagaggcgtgtatcccacgccggaatttgcagcgctttaaagccattctcggccgcccattttgcaagagtcggcaggctgttgaaaggcgcgaggtcatcactaaattgtgccagatgcaggctgggtccttttatggttctcatcgtgttaccctattgtttgtcgattgacaaacaataggggcgatcgacaccctttgccaagccttttacgcgaactgagcacaaatggcttagtgtagaaagccagacactcctgattttgaatgttattttttggcgtctggcggataataatccataaaatttgcatcaatgagagagcatgatggccggaagaccgagagaatttgaccgcgataccgcgctgaacgacgcccgagacttattctggcgctgcggctatgagggcacgtcgatgtcaagtctggttgcgacactgggcatcgcatcggcacgcatttataaggctttcggctcaaaggagcagctgtttcgggaagccgttgcgcattatgaggaaaacgaaggcggattcgccgaacgcgcactcagggagccggacattacccacgctatctcccgcttgctggaggacgccgtactgctgtacaccgcccagccgcttcaccttggctgtatggtggtctcttccaccagcggacttagcgatgagaatcagtctctcgccgagtggctttcacagcagcgcaatcaaagaacgcagggcattatcgacagattccgtcgggcggcacaggaagggcaactctccgccgacgcctcggcagacctgctgggaaactattttgctaccgtcctgcacggcctgtctgttcaggcgcgcgacggcgtgagtcgaaaggacttatcgcaggtgattgccctgtcgctgaggcttttagagaccgcgaggtcagtgccagaccgctgaaagtagttagaataaacatagattttttcgttcgttgtcatttatgccgccatcataaaaactccgctcattaaataataatcaaggtgcggcaatgacaacacaatccctcccacagcctgaatatagccgcaatatgcggctgattgggcacagggtgtcacaggggtttttccatcatcgacgcacgtgcttttcagtgcactggcgtcgttttccctccctccactgcgcacgtttgctgttcaatcgccgaggcattttctcgtccttccagaaggcatcacctatcctaggtatctgattaaaaaagttgaaccttgaaaaactgaggtaatagggctacactgccaaggtcaattttgtgacggggatcggctattgcccacgttaattgaaggtaagtgtcaggaacgcatgataactattttgggagtgccttttcagtgaacaaaaccatggtcaaaaatatattatcgctcttcatgatacagggagccggatatattttaccccttatcacactcccctatctggtaagagtgctaggacctagtgaatacggtgtactcggattctcgttagccttcgtccaatatttcacccttctcgtccaatacggttttgatctctccgccaccaataaaatagccattcataaagacgacaaaacgctggtcagtcaggtgttttggggagtgctgttttgtaaaaccattttagtcatccttggcgcgctgctgatggtggcgatcctgcttcttgtgcccggcctcaaagattacagcacggtcattattgtttcttacacctcggttgtcggcgcggcctacgttccctcctggctgtttcagggcaaggaaaagatgggctggatggcaatctcgaatatattggccaaaattgtcaccatcccgctgatctttattttcgtgagttctccggctgatacctggattgtggccctgattaccggtgcaggattcattctgggctctctgtttagcttctacatgatttatcgcgagaagtggattgaatggacccgtccgacccttgggcagctcaaagaacttattcaggacgggcgctatatcttcctgtcgaatattgcgggcagcctttacgtcaacagtatcccggtatttctgggatttgccgcagggccagttaccgtaggctactatgtggcagcagacaggatccgccaggcgatacagggtttgatgagcccggtaaccagcgtgttctaccctagaataagctcgctgatgtcgattgataaggccaaaggcctgagaatgattcggctattgctggtcggacaaaacgcggtcgcgctgctgatgacgctgttgctgatgattttctcccatcaaatcattgatctcttttacggtaagacctatcacgaatcgatttctatcctggtgctgctcgccccgcttattttctttatcagcgtgagcacggtattaggggtacaggggatgttaattattgggatgagaaaagagtttagccagatactctggttgggtgcgatactcaatactgtgattattttcccattaatatggttggcaagcgcagacggtgcggctatttcggtgctggtcaccgaggcgctggttgcgattttgattgtatccaaaaccaagtccatatggagacgttcttaaatgtctgatgaacagaatatagttaattcaaccccattggccggggtcgtggtttggtacaatcctacagaaaaagaagtcgacaatattcgcagctatgtcggcttcctgaaaaacctctacgtgatcgacaattcggcgaatgataattcagccctgctcagctcgcttaatcagaatgacgggcatattcagtacatcccgaatcttgataacctgggcatcgccaccgcgttaaataagggctgtaaacgcgctatcgaacaaggttatgactggatattgaccatggatcaagactccagttttgatcccgtcgagatgagcaagtttattgcctcattcgaaagcaaaaagattgaagacccgagtattgcgctcttcacgccgtggactaatgaatttcatcccatcggctacgcgacgcgggtcatcacctcaggcaacctcctcaatctcaccgcctatcaacagattggcggcttcgatgacaaattattcatcgacgaagtggaccacgacctgtgctacaagctgacccagtttaactacaagatttataccttcgataacgcacggatgcagcacaaaatcggtgacgcgaagtcgcacgctttcctgttccccgccgactcctggtgatgcaccacggtgccgtcagaaagtattacatcatccgtaaccgcttcctgctgcgcgaacgtttccctgatttcactcgcgattatgccaagttcaatatcatgttactgctcggcgttatcttctttgagaaacaaaagtggctgaaactacgttacatgttcaaaggctactgcgactacaaaagaaaccgactgggccgtatgcgatagatttgccgacagaaaacaacgcgccggaatacctatcccggcgtaaacttcagttaggagtccaatgaacaccctcatcgttgtcgatatgcaaaacggcgtttttgcgaccccgcgctttcaggctcaagagaaaattcagaagataaacgccttgattgctgccgcagacagagtgattttcatccagcacgagtgtgacggcatgatggaggggagccaaaactatgcgctactgcctgatgttttgaccccaaagaggtcttttacgtcaaaaaaaccgcctgtgacgcgttttcacacacctctttggccagcctgctgaaagaactttcggagcaggcgtttactatttgcggttgcgcgtcagactactgcctggacagcaccatcaaatcgggctgcgccgcagggtatcgcatcaccgccgtagcagatgcgcacaccacgtcggaaagaaaatgggtttccgccgaggcgctgatcaatcagcataatgaagtttgggaaaactttgaccaaccaggcaatccaattctggtaaaacccaccgcccaggtgctgacagaatggcaatcctgactcaaaaatgatcgcttaccgagctcgtcatgccctcaactcccgcgctgaggtaatcaaattcagcaaatgctgagccgatttgcactgcgaggtccgccgccatgccagcgcgacctgcgtggtgatccgttggttcgagacaggcaggcagcggacgttatcggcatcgattttacttaacgaggccggtaccagcgcatagccaaaaccggtcgccaccatgctcagcgacgaagcaatctgcgggcactgctggcccagattcggcgtgaagcctgcgtcttcacaggccgcaatcaccgcatcgtacagtcctggcgacagatcgcggggaaaagttatcagggtttcattacgtagctcacccagtgaaacgctcgcccccggctcaacggatgcatcttgggcagcgcaaccatcatctcctcgttatcaatcacccgcaggttaaattccttgctgcgctcgcacggcaaacgaataaacgccaaatcgatggtgccctcactcagcgcagtcatgagtgctgacatgtccttttcctgaggctccagcttcacgccgggatatttgtcgcgatagtgatgcaacagcgagaagacctgcggattaaacgccgacgagctggcaaagccgatgcgtaagaagccgttcatacctcgcgccacgctgcgggtgcgctccagggcggcatcggagagtttaaggataatccgcgcgtcctcatacagcacttgaccggcctcggttagctcaacgccgcgcgttaaacgcctcagtaatgacgtacccacttcatgctcaagccgttgaatttgctgactcaaagggggctgcgagatgccgaggcgttccgctgcccgggtaaaattagttgtctctgctacggcaacaaagtaacgcagatgacgaagttccatattaaaaacgtctcaaagtgaacacctcttcatattggaactcagggcggaatggagtcaacctttagttaatcttgttaatggattttccggagccccgtatgagcaacctttctgtttcacgttccaatgtcctctatcaggcttctttgatgagcgccctactcagcggcgtctatgaaggcgataccaccatggcgcagctgcgcgagcacggtgacttcggccttggcactttcaacaaactcgacggcgagctgatcgccttcgacggcaacatcttccaactgcgcggagacggtaccgcgagacgcgccacgtccgaccaaaaaacgccgtttgcgacgatgacattctttaaccccactaatgaatacaaaatagactgtccgcatacccgtgaagagattcatcaggtcatcgataaggtcatcgccagtcagaacagcttctgcgccctgcgcatcgacggcgaatttagccgtgtcgatacccgcaccgtaccggaacagcatcgtccctataaaccgatgcttgaggcggtgaaacaacagcccacctttcacatcgagaacaatcgcggcgtgctgatcggttttctaaccccggaatacatgcagggcatcaacgttgcgggctatcacgaacactttatcaacgaggcgcgcagcagcggcggtcacgtgctggactatcaggtcgagcgcggcacgctgaagtttggcaccgttgaaaagctgatgatcgacttcccatgggacaccgatttcctcaatgccaacctctcgccagagaacctgcaggaagccattcgggccgttgagagttaacaggagcgataaaaatgaaagaatcaaacagcagtatcgataaaaacgatgaatggaaatgcggcgcggacctggtcgtcgctcagctcgaagcacagggcgtcaagcacgtattcggcattcccggggccaaaatagaccgcgtctttgattcgctggtcgactcgaaaatcgacaccgtcgtggtccgccacgaagccaacgccgcgtttatggccgctgcggtcggacgcctcaccggcaaggcgggcgtggcgttagtcacctccggtccgggttgctctaatctaatcaccggcgtggccaccgccaactctgaaggtgacccgatggtggcgttgggcggtgcggtgaaacgtgccgaccacctgaaacaggtgcatcagacgatggacaccgtgtcgatgttcaaaccggtcaccaaatattcggccgaggctatctcctcctccgcgctggcagaggtagtttccaacggttttcgcgccgccgaattcggccgtcctggggccgcatttatcagcctgccgatggaccttatcaataagccgacgcggggcaagctgctggcctcctattcgcccacccttggcagcgcgccgcacagcgccattcttgaagtctctaaattactggagaaagccaagaatccagtcttgctattaggtctgatggccagtcagcccctaacgccgaggcaattcgccgtctgctgcataaaggcgacctgccagtcaccagcacttatcaggcggcaggggttattgaccaggcttcattccaccgtttcgcgggccgcgttggactatttaacaatcaggccggtgaccgcctgctgcgcaacgccgatctggtgatcactattggctacagcccggtcgagtacgaacctgcccagtggagcaacggcacggccaaactggtacacatcgacgtgacgcccgccgagaccgacagcctgtatcaacctgaaatcgagctagtcggcgacatcgccgccaccgtggacctgctaacggagcaggtaaaacagcagattgcgctgagcccggcagccatcgatatccttgaggaacgccgtttacagcggcagttgctggatcagaaaggccgcagcctgaatcagtttgccattcacccgctgcgtctggtgcgcgcgatgcaggacatcgtcaacagcgacgtgaccctgtgcgtggacatgggcagctttcatatctggattgcacgctatctttacagcttccgtgcgcgtcaggtacttatctccaacggccagcaaacgatgggtgtcgcactgccttgggcgattggtgcggcgctggtcgagcctggccgcaaggtggtgtcggtatccggtgacggcggtttcatgcagtcaagcatggagttggaaaccgcggtacgactgggcgtgaatctgctgcatatcatctgggtcgatcaggcctataacatggtggcgattcaggaagagaaaaaatatcatcgcacttctggcatcgaatttgggccgattgacttcaaggcctacgccgacgcctttggggccaagggttttgcggtaacctccgccgattcgctggagcgcaccctgcgcgccgcgatggacgtccaaggtccggcggtggtggctattccggtcgactacagtgataacgcgctgctgatgagccagttgaacatgaacgagattttctaaaacgctccgccagacgccacatcattgcggcgtctggccttattgctcactcgttgggtgaaacaactccgccataaaactctccagcagcagattcttgttactcccttttcgagtggtcaccacaatatcggtattcaacgacagccgatgcggatttatcgtcagcatctcgccgcgttcgacccagatattggcgtaatgatcgggtaaaaaaccgacgaactttccggtgaggatcagaaaggcaatgccctcacgatcgctggcccgcgccgccgcctgcattcgaccataaagcgcgagcgtctccggagtaatacgtccattgggcaccaccgcgtccaaaccggctattgccgcctcgggcagttcgccgctatgcgcaaacaacggatgctgccgaccgcaatagagagaggatttctcactgtagatagcccgatagtcgagacctgaaagcggtgacgtcatcggaaccacgccgacgtgcagccgaccatccagcacctttctctcaatctcttcctgcgtcgtcatgctgatattgatgactacgtccttccccttgccgcgcaggtgcgacagcgcattggtgaccttcatctgcggttgggttatcaggttattgatgatgccgatgttaaactcgccgcgcagatggtcgtggatctgattgacctgctgacgaaagttttcaaccgccgccagcagcgtttcgctgtctcgcagcaccacccgcccctcttcggtcagcgcgaaaccggccctgccgcgttggcaaagccggatccccaaacgtttctcgaggtcccccatgtgcaggcttatcgacgaacgggtgatgcccagcagcgtttcggcggcggtaaagctgccgcattccgctaccgttttgaatatcttcagtaatttgatatcgacatcggcaatctgaccaattttggattttggcatttaggtgagtaatccaacatctgagcgtgagttgttttagatttaactcacccggcgaatcattgcaaactctctgtcatcacctcatttaacaagaccgggacagacgccatgaccaacgcctttgacgtagataaactcaatctgaatgcgcattggatgccgttcagcgccaaccgcaatttccaccgcgatccgcgctttattgtcggtgccgaagggcaatggctgttcgataacgacgggcgcaagatatacgacagcctgtcggcgctgtggacctgcggggccggtcatgtgcgtggcgaaattcagcaggcagtgagcaaacagctcggcacgctcgactactcgccgggattccagttcgcgcatccgctgtctttccagctggcagaacgcatcgttaatcaccttcccgacccgctcaaccacgtgtttttcaccggatccggctctgagtcggccgacacggcggtgaaactggcgcgggcctattggcgtatcaaaggtcaagcctcaaaaaccaaactgattggtcgcgcgcgcggttatcacggagtaaatatcgccggcaccagcctcggcggcatcggcggtaaccgcaagatgttcggtcagtttatggacgtcgatcacctgccgcacacgctgcaaagtggaatggcgtttacgcagggcatggccgaaaccggcggggttgagctggccaacgagatgctcaagctgattgagctgcacgacgcttctaacatcgcagcgctgattgtcgaaccggtttcaggctctgcgggcgcaattgtgccgccaaagggctacctacagcgcctgcgcgagatttgtgaccagcacaatatcctgctgatttttgatgaggtcatcaccggctttggccgcatgggccgctggtcgggcgcagaatactttggcgtcacgccggacattctcaacttcgccaaacaaatcaccaacggagccgtgccgctgggtggcgtggtcgcgtcgagtgaaatttatcagacttttatgtcgcaaaacctgcccgagcatctggttgaattcccgcacggctatacctattcggcgcatccggtggcctgcgccgccgcgctggcaacgctggatattctagagaatgagcagcttatcgcacgttccgccgagttggcccccactttgagcggaaaattcacgccctgaagtcctgtccgaacgtggtggatatccgtaactgtggcctggtcggggctatccagctggcttcacgcgataatgatgcggccatcaggccgtttgatgccggcatggcgctgtggaaagccggtttctatgtgcgttttggcggagattcgctacagttcgggccaatgttcaccgcaggacaacaggatctcgaccgcctgttcgacgccgtgggcgacgtgctgcacaagcttgcctgaggatgattttcccgaatgaggcggttatttgctttagcgatggcgacggagaccctgctgccgttactgaaaaaatcgttatggtctgaatgcggtcgaaaacggcaaaggtctcgctagctcgcctgcgagcggatcgcttcaataatcgcgttggcggccggggacagcaggcttccggcgcgataggtaatgccgattgcgcgacgggtgtcggcaagctccacgttgagcgtaaccagttcgccgttgtccagttcgtgctccaactgtctggctgataccgccgccagcatgtcggaatcgagcaacagcccacggacgatagccaggtcgccgctctctactaccggatccggcgccgggatgttcatcgattgaaagctgctctccagcagttttctggcggggtttcggatcgcggcagcacccagcgtgcgttgcgaagctcttcaggtccgaccgaggtttcgctgagcggatgaccgcgccgcgccagaataaccatctcttcggtaaacagcgtctcggtcaccatatccgccgcataatcgctggtgcgcagcgcgccgacgataaaatccacctcgccggaacgcagctcggaggccagcaccgcaaaggcactttcgttggtaatgatcttgataccggcatagcgggcggtcaccgacaggatggcctgcggcagcagacgtgctcggctcagcggtagcgcacctatctgcacggtaccgaccagcaccccctgacgggacgcgatatcggcgggaatatgccgcagctcgttcagcgcacgtcggatattaggcacaatttcctggccagcgagacttgggatcatgccctggggcgtgcgttcgagcaacgaggtgtccgcaccgttttccagcaccttcagcgcggccgagacggcgggctgactcaggcccagcagcgtggcgacggtctgcatatgccgcgtcttgcagagcgcaacaaagatttgcagccgccgtacgttgaacaaatacagcggttctgtaggcgctctgcccggcgcatttttaccctgcaagcgcgtcagcagctcggcggtgtcgtgcaggtcggctatcgcacgacgggcacgcggaagaatgcattttccgtaatcggttagcagcataccgttggcgtggcgctcaaacaggggaacggctaaatgctcctcgaggtcgcgtattgcccgcgtgatggccgattgggtgcggaacagttcgtcggccgcgcgcgagacgctgccctgatccacgacctgacaaaatgcccggatctgcatcaggttacataactctcgttcttgcctcatccccttctcccgtctgtctttttttcgtgaactgaaccagcaatataaataaaacgcatacctgctgcaattaaatgaattacctgtgtcccctgtccactgccagcatagaaatcagaccacgcgatgcgtttggtaccctcaaaatataaaatgataaggattaggcaaatgacaaatacaaacaaaggtgctgccgatagcgcagcaaaaagcgccctggttgtcagtgctcactcggctgactttgtatggcgtgcgggcggtgctatcgcgcaacatactcagctgggttacaaggtccatatcgtttgcctgtccttcggtgagcgcggcgaatccgccaagctgtggcgcaaaggcgagatgaccgaagagaaggttaaagccgcacgtcgcgaagaagccatggccgccgcagaaattctgggggccagcgtcgagttctttgacatgggcgactacccactgcgcgccaccaaagacgacctgttccgtctggccgacgtttaccgtcgcattcagccacacttcgtgctgacccattccctgaaagacccgtacaactacgatcacccaatggcgaccaacctggcgcaggaagcccgcattatcgcgcaggcagaaggctacaagccgggcgaacctatcgttgctgctccgccggtttattgcttcgaaccgcaccagcctgagcagtgtgaatggaaaccggacgtcctgctcgacatcaccgacgtgtgggacaaaaagtatgccgccattcagtgtatggccggtcaggaacacctgtgggaatactacactcgcgtcgctcagcagcgcggtgtgcaggccaagcgtaacgttggcatcaccaccagcaaaaacatcgtttacggtgaaggctatcagagcatcttcccacgcgtgacaggagagcttgcatgagcagcaacgacggtttaatcctcggtaaaaaaggcgtagtggtgcgtaatatcccacgtgccaagcaacaggacgtcgaggcgctggcggcgtttggcgttgccaccgtgcatgaagcacagggccgtaaaggcctgctggacggcgaaattcgtcctattcaacgtgacctcgccatctcgggcagcgcagtgacggtgctggtcgcgcccggtgataactggatgttccacgtcgcggtcgagcagtgcaagcccggcgatatcttggtggtagcaccgacctcaccatgcaccgacggctatttcggtgacctgctggcgacctctttgaaggcgcgcggcgtggtgggtctcgtggctgacgttggcgtgcgcgatacccgcacgctgcgcgagatgggctttgccgtctggtcacgcgccgtctatgcacagggcaccgtgaaagagactctgggttcggtgaatattcccgtgctgtgcgccggtcagattatttatccgggcgacgccattgtggccgacgacgacggcgtcgtcgtggttcgccgtgaagaagtcgcccaggttgctgaagccagccgtcaacgcgaagcgctggaagagagcaagcgtgcgcgcatggccgacggcgagctgggtctggacatctacaagatgcgcccaaccctcgagcaaaaaggcctgacctattatgatgacgccgaagcgctggaaaaatcgctgaagcgttgaggaggcacgatgttgcaaactcgcattccctgtgtcctgatgcgcggaggcacctcaaaaggggccttcttcctggccgactctcttccggcagacgccgagcttcgcgacaaggtgttgctggcggtcatgggttcccccgatccgcgccagattgacggcgtcggcggcgcagatccgttgaccagcaaggtcgccatcattcgcccttcggcgcgtgaagacgccgacgttgactacctgttcgcgcaggttaacgtcgacaaggcggtggtcgattacgggcagaactgcggcaatattctcgccgccgtgggtccgttcgccatcgaacaacgtctggtcgaggcgcgggacggcgtcacgccggtgcgcatcttcatggaaaataccggacaaattgctatcgcccacatccctaccccgcaggggcaggttgagtacgaaggcagcttacgcattgacggcgtgccgggtaccgccgccgaaattatgattgagttcgccgacatcgccggttcgagctgcgggtcactgctgccaaccggtcaggttatcgacaagtttgacggtatcgaagtgacctgcatcgacaacggcatgccggtggtattgttgcgcgccgccgatctggatcgtaccggttacgagacccgtcagcagctcgacgacgacaccgaactaaaggctaagctcgagtctattcgtctccaggccggtccgaaaatgaatctcggcgacgtggcgcagcgtacggtaccgaagatgacactggttgccgaagcgcgcgacggcggttcactttccagccgcacctttattccgcaccgttgccacgcctcgattggggtgctgggtgcggtcagcgtggccagcgcctgtctgttgccgggttcggtcaccgagggtctggcgaatacgccagagggaacacgtccgcgcatcagcgtagagcacccaaccggcgaattcagcgtcgaattgcacattaatcctgccgcatcgggtgctgaaagattgactgggtgcggattgttgcggactgcgcgtctgctgttcgaaggccgcgttgccataccaggcagcctgtgggacggcaaaaacgcaggaggctctcatggcaacgcctgatttggaactcaacgtcaggcgggttgcgctgattggtcttggcgaggtcggtactattctggcgaccgacctcaaggcaaactatcccgagctggcgatcgtagcttttgatctgctgcacgataaaccggcgatgcaacagaaggcgcaggacctgtcaatccgtatggcaacctcacttagccaggcggtggaagaaagccagctgatattctctgcggtgaccgccgcgcaggcactgagcgttgccgaacacgcggccaccctgattggccggggcagaccttcctggacttgaactcggtgtcgcccaacaccaagcgtcaggcggctgagtttatctcacggcacggcggcgagtacgttgacgtggcggtgatggccccttccctcctgcaaggctaaaaacgccgctgctgctgggcggtaaacaggcacaggcgactcgtctttggctgaatgcgcgaggtttcaacagccaggttcacagcacagaagtcggcgaagcctcggctatcaagatgtgccgcagcgtcatgatcaaagggcttgaggcgctgaccaccgaatgcctgagtgcagcacggcaatacggcgtcgagaaagaggtgctcgcctccctgcacgccagcttcccgtcgctgggctgggacgacaaactgccgcattacctgattagccgcgtcgccgagcacggcaaacgccgtgcagaagagatgcgcgaagtggtgaaaacgctggaagacgtcggcgtggtcccgcatcagagtaaggcgacggttgaaacccagcagggctttattgacgctctgaccgcccactccctgagctatcgcgatctcgttccgttcgactgggaaaagaccgtcgacaggttgtacaagtcacactgatggcaatgcggctatcctgactttcccccagccaacgcggcggggaagtcttcaacttacccgatgacagcgcaccgcagccccggaaagattaaccctgagatcctgcggcatgtgacagccgtcgcccgcaaaggggcaacgctcgcggaaaaagcagccctgcggcagaatgcgattgctcggcagttccccttttttatcttcctgtccctcttcaagagaacgaccggcctgcgggaccgagtccagcaacagccgggtgtacggatgctgcggatgcgtcagcaccttttccgcaggccccagttcgacaatctgtccgagatacatcaccgcaacccgcgaactcatgtgtcgaaccaccgacacgttgtgcgaaatcaacacgtaggtcagattacgctggcgctgtagctcgaccaacaggttgagaatctgcgcctgaacggaaatatccagcgccgaagtaggctcgtcgagcacgataatgtccggctcagacgagagtgcgcgggcaatggagatccgctggcgctgaccgccggaaaattcgtgcggcagcctgtcgagatactccttgcgaataccgacctgctctgccagcccctcggccagctgtcgacgttcgctgaccgaattgtgtttttgcacataaaccggctcggtgatgatgcgccagacaggcaggcgcggatccagcgaggactgaggatcctgaaacaccatctgcatgccggaaccaaaccaggaaccgtcggagcgcgcccgcaacagctgtccgctgctcggtttttgcagccccatcaacagctgtgccaaggtactcttgccacagcctgactccccgacaatgcccagcgtttcgccgcgcatgatgttgagatcgaggccgttcagcgcattgacgtagcctttcggcttacccagccagttatatttcgccggaaaacggacgcgaatatcctgtaattcaatcagtgcatcgagattcatcaggcctactcctgcatggtaaggtcggtatccgctgcggatgccagcaagacacaagctgttgcgcgtggccctcgagcggcatcagtttggggattgcgcgcactgttcatcaccctgagcacagcgtccgcgaaacgcacagcccgcaggcagtttggcaagattcggcaccgtgccggggatggctttcagcaaactgcgcggctcgccgttctcggggcggcctgcaatagccctattgaataagggtgcgccggctggccgatcacctccgcggttttaccgctttcaatcacgtgcccggcgtacatcacgtaaacgcggtcgcagagctgcgacaccaccgccatgtcatgagtaataaacaacaccgccgtgccgctggatttcgctttgcgacgcagcaggcgtaacacctgacgctgtacggtcacgtcgagggcggtggtcggttcatcggcaataatcagttccggctcgcaggaaaaagccatcgctatcaacacccgctggcgcatgccgcccgagagctcaaacggatagcgccccatcacctggtcggcgtcaccaatctgcatctcctgcaatagcccgatggctttctggtaagcctgctggcgagtaagatgctgatgcaaacgaatgacttcacacatctgacggccaatcttgcgcgtcggattcagcgcgttcatcggttcctgaaaaatcatcgccacccgtgcgccgcgcagctgacgcatctgtttatcactggcgttgatgacgtcggtgcccagcaggcgcagctccccggccttaatggcgaagctgtcctgcggcaggaggcgcatcgacatcatcgccgtgaccgacttacccgaacctgattcgcccactaccccgacaatttccccggcgttcacctggagcgagacattgttcagcgcgctgatttctccgccgtaaaccggaaacaccaggcgcaggtcgttgatttccaatacgggcttctgcgtttcttctgccatcgttagcgccctctgcttttcggatcgagcaggtcacgcagaccgtcgccgaacaggttaaaaccggtggccgtaatcaggatagccatgcccggaaacgcggaataccaccactggtcgagaatatagttgcggccgttggagaccatcgcgccccactccgccgtgggctgctgagcgccaagcccgataaaacccagcgttgccgccatcagaatcgaggtaccgatgtcgagagaagcctgcaccaccagcggcggtagtacgttacgcagcacgtgccaggtaatcagatgccagcgcgacgcaccaaaggtgcgcgtggcctgcatataagcctgatggcgcagcatcagcgtttgcccacgcgccagccgcacataaaacgggatacgcacgatagcgatcgccagcatggcgttgaacaggctcggccccagcgccgccgccaacgccatggtcagtaccagcgacggaaccgacagcatgatgtccatgcagcgcataatcagcgcgtccaccagaccgcccatcacgccggaaaaacagccgagcagcgagcccacacttcctgcgagaataaccaccgccagacccgccgcgaccgactgctggctgcctgtcaacacccggctaaacaggtcacgccccacttcgtcggtgccgaaccagtgcgcggctgacggggcctgtagtctcgcggttaaatcgatagcgttagggtcatgcggcaccagccaaggtgagaacaccatcaggaacaccacaatcagcatgattgccagccccagcagggtcagcgggctgcgcctaagcaggtgcgcagttttgcgccacgaggcaaagcgcggctttacatcgggtggcacgatatcggcgcgacggctgtcgacgcccggttcaagtaatgacatcgccttaccccactctgccgatacgcggatcaatccacacgtagagtaaatccacccataaattcaccagcacataggcgaaggacaccaccaccgcaaaacccatcaccgcggggaaatccagcgcctgaatcgaactgacgacgtaggccccatacccggccaggcaaataccgtctcagtcagcaccgcgccgtagagcagatcgcccatcgccagcccaagcacagtcacggacggaatcagcgcattcggcaaagcgtgacaaataatcacccgccagtgcgacagcccgttggcacgcgcggtgcggatatagtcctcgctcatttgttcgagcatcgccgaccgaatctgccgcgcaacgatacccatgtggacaaacgccagcgtcagcgcgggcatcagcaggtgttgcaggctgttccacagcgcatcacgattgccggtcagaatagagtcaatgacgtaaaaaccggtgatgtgggtcggcggatccatccagtcatcaagcctgccgccacccggcaacagattcagatggccgtaaaacaggataataacccccaagcccatccagaatgccggcgtcgagatacctatcaccgacagcatacgtacgatgtggtcgggaaatttgttgcgatacaccgccgagagtacgccgagcggaataccgagaataatggccagcagcagcgcactgaacgccagctcaagcgtggcgggaaaaaaggcccgcaggtcatcaagcaccggtcgaccggtacgaatcgagacgccaagattgccatgaagcaaatcaaggacgtagcggtaaaactgcacgtacagcggctgatcgagccccagctgttggcgcatatgcagcaccatttcgttgctggcgcgatcgcccgccaatagccgcgcggggtcaccggggatcatgtgcgagatgataaaagtgatgacgcaaacgcccatcatcaccaaaaccagcccccagcagcgctggcgaataatggtccaaaaagtcataacatcccctgaacgcggcaccgaaactcctcgcttcggtgcctttgaaacgtcgaccctaagtcggcaaggaaaacttattgcttgctcatctgcgcgacgttaaacacctgttcgagcatcgggttgaacacaaagcctttgaggtctttgttcattgccacctgatagttcttctggaacagataaacgtaggccgcctcgccgatgacgattttctgcgcctgctggtaatagtcagtgcgctgcttctggtcggttaccgataccgctttcttcagcaaatcatcgacctgtgggttggagtagaacgaacggttgcccggcagacctttcttgtccgactcgaaccagtagttcatgaacatgtaagggtcggcgaagtctgggctccagttgccgatcgagatgtcataatccccttgtccgatgcggtcacgcatagtggcattagccagcttctcgagcttcaccttaatgcccgccgaggccagactcgcctgcacggaaagcgcgatcggttcccagtttgggtcgctgtcggagtagaggaagtcgagcgtacccggctgggtcttgaccttagcaaggtcggccttggcctgactcaagtcggtgctgtactgcatcgctttcgggtcatagccccacatgccgtcggggataggtccgcgcatctgtttggcgttaccgccgagaatgcccttcaccatgccctgatagtccaccgcgtaagagatggcacggcgcaaatcgacctgattcatcggcgatttggcattattgaggtagaggtaagtcacgcgtagggagggatattcttccaccgcaaccttgttctcctgcttcagcgccgcgagctggtcgataggcagtgagtccgcaatatcaagatcgccccgcgacagctgcaaacgtcggctcgagctttcgccgatgatttttaccgtcacgcgcttaaaggccggtttcgggccgctgtaataggtattggggaccagcaccagctgctggcctttctgccaacgctcgagcttgtacggacccgacccggcggtgtggctcgacagccaggctttgccgtcgtcggttgggttggccttggcaattgccgggttgacgatgcccgcaccatcgttggccaaagtgtagaggaacggcgcaaacggcgttttcaaggtgaagcgcacggtcatcgggtcaaccaccgatacctgcatgtctttcgggaacgcctccgacgggccctgcccaatcttcatcagtcggtcaaacgactcctttactgcgtcggcattgaccgccgaaccgtcgtcaaacctggcacctggcttgagtgtaaaggtccagaccagctggtctgccgacgacgtccagctggcggcaaggtcgccctcgacctgcgtcgagcctttgccgtcttcggttttatagcccaccagacgctgataggccggataggtcaccgtccagtcgttgttatcgatagtcaccgccggatccagcgtttgcggatccgccgccttgccaatcaccagcatgtccttgggcacggcggcctgcgactgtgtcgtcacaccagacagcgccatgataaccgcaccggccaacgccgttttatgtaataacgccttattaaataaagattttacgatggtattttctgtagaaatcgacatctgcaaactcctggtgtttaaacgtagcaaagattaatgcgccaaggttcaggcaaggtgttttgaaggaaaacagtcaaaaacgtcggccaacaagggataggaaatcgagttcggcagctcgaagtgccaccactcggtcggcatgccgataaagcctcccgccgccattaccgcattcagcagcaggcggttgcgctgaatttctggcgcgagatgcgggtagaatggatgcgagcgctcggtcatttcatcgaaacccgcgcccatatccagctcctgcccgcgctcgtctgtcagcgtaagatcgacggcgacgccccggctgtggtgggatccgattttgatatcggcgacataatcagggttgggcagcaccgcccagaagatatgctgtgcctgcttcgggcggtaggcgtcgaagatcttcagatttaaaccggcaagctgcgcgacctcaaaacaacgcaccagggcggtggcggcgtcgggatgcagtaagcagcggttttcgcagtacaccacctgaccggtgaggttatcgtcggtggcatacttcatgtcgatgaccgcctgcggcaaaagtttggtcacgtcaatcaaggttacgtctggttgtttcataataatttttacaatcccctgttccgaaatgttttcctgagcggctcggtgcgtgcacagagccatcaggactcgaactgtccaaactctttttgcaaaattcggttggtggcgagacgctgctcgacctcgtctccgccgcgtagctcaagcaccgccgagcacagcaggttaaacaggcagcttaacggtgccatcgagtcccaaaattggccggtgtcggtctttatctgcaacaggtcaaccgggtagtcatgggcccaagggcaatagatgtcggtgatcagcccgacgcgcagcccgcgatcgcaggcggctttacaatatttctgagcgatcaccgaataggcgcgcgtgtcgctcacaatcaaataaggcgaagaaaattccgagttgagcgactcgacgtaggtgccggactggccgtcggcgaaatagacctgtggtcgcagatattcaagattgctgtagaaggtgttggcgataccgcgcactgactgaatgccgaggataaacaccgcgtccgcctccgccagcccgcggctgatttgtgcaaaaccttcgctctgcgccagctgatacacgtgttgaatcgcctcaagttctagcgtcagcgcctgctgaaacttctcctgccgtggctgcttgctgcgctggcggtaagcgcccagacggtcggttaccacccacggttgatacatcgcgccgctactttgctggcgcagcgtctgcttgaaatcatcaagattgcgatagccgagactgcgcagatagcgcccgaccgagatcccgctggtcgcggcgctgcgtgcgatactgtcggcggtctcaaagggaatttgcgccagattagcgagcagatagcccgcgatgcgctttccggtcggcgtttgggtggcgaaggagccttcgatttgtgcaattacatccagattctcggtcataggcccctgttgctttgttatcagcaccgcatcgcttgttagttcactaacaaagcaacagctgtgccaatatccaaagcgaccaagaattagccaaaaaatcagataaaaatcatgaattaatcagaggaataaggctgagaaacggctgatgaagggcaataaccggggaaggtaaaagaagggctgcacgcttagcaagcaacccttcacaatgcaggtgcaatgtcagccgggctacgcgtgatgacgtagcccggttggtcacagcctgctctatgccgggaaagcccttaaacggtgctttcctgcacggcgttttcacgcagcaacgttagcgcatgctcggccagctgcgagaaatagtgcgctgccggagcaatcagcgcctcgtctggattaaagctgtcgtgatgcaggccaaattcgctggcgctgccaatactcacgaacgccccggcaccttttgcagatagatggcaaagtcctcaccgcccagatgcaaatcggcagtgcgcacgcgatagccgctttctttagccacctcggcgctgactctggcccagttttcgtcgttaatcagcaccggtggacctgcggtccagctgacctcggccgttccgccgctggcttccaccaggcttttcaccagatgaatcacccgctgctgcacctgctcacgcacctttacgtcgtgagtacgcaacgtgccgccaaacatcaccttctctggcaagacgttccacgttttaccggcgtcaatacgcgtgatgctcagcaccaggctgtccagcgtgttaaagctgcgactggccagcgcctgcaacgcctgaatcacctggctggcaagtacaatagtgtcgttgccctgctccgggtgcgccgcgtgtgcccctttaccatgaatattaatgatgaaacggtcggcgttggcatagaaggcaccgcctcgcgtcgcgaaggtccccaccggcagacccggttcgttatgcatgccaaaaattgcctgtacgccgtccagcgcaccggccttaatgaactgcttagcgccggtgcagttttcttcgcccggctggaagaacagcctgactctgcccggcaatgtcgcttcacgggccttcagctgtagggccgcgccgagaatcaccgaagtgtgaatatcgtgtccgcaggcgtgcatgacaccgtcgttctttgaggcataggccagctgcgtctgctcatgaatgggcaacgcatcgatgtcggcacgcaacgcaatcagctgctctccctgccctatctctgcgaccacgccggtgtggatcgggtaatccagaatgcgaatatccgccgcctgtagccattcacgaatgcgggcggtggtttccagttccttattcgacagctctggccagctatgcagggttctgcgccatttaatcaactgcgcagcaaaattgtcgctcatacggttcctccagaatcgagaatagaacgaagcgaggatctccattcctttatcgctgatagtgaccgctcgcccaaggggagtaaaagaacaattccgcgcaagggaatgaaaaatatggcaataggattatctattttccggcaaagcttatcgtaaatcgttggttcacctgccgccgacatcttcggatgatagtagcgtccgctgaggcggtgacgcccactcacgatcctaaacgccgctcagtctttttatctctttcaaaccctgaggattttatgacggacaccttatccgaacagctgatttcctggcggcgtgagctgcaccagcatcccgaactttccaaccatgaatttgccaccaccgagcgcatcaccgcctggctaaaacaggccgatatccgcgtgctgccttttgcgctgaagaccggtgtggtggttgaaataggtcagggcgaaccgctgattgcgctgcgtgccgatatcgatgcactgccaattgaagaggcgacggcacaaccctttgcctctaaaaatccgggcgtgatgcacgcctgcgggcacgacgtgcacacctccgtgatgctcggcgtcgcctatcagctcaaagcgctggaaaaaaacctcaagggccgggtgcgcattcttttccaaccggcggaagagaccttcaacggcgctcagcaattgatcgatgcgggcgcactcgaaggcgtacaggctattttcggcatgcataatgccccgacctgccgctcggcacgctcaagactcgcggtggcgcgttttacgctaacgttgaccgttttgaaattaatattcagggcaaaggcgcacacgccgcgcgaccgcacgagggcatcgactctgtcgttatcggcagccagattgtcaccaccttgcaaacgctggcgagccgtatttacagttctcaggagtcggtggtggtcagcgtaacccgtttcaccgcgggcaatacctggaacgtgttgccgcagagcgtcgagcttgagggcaccgtgcgcactcataacgaggctatccgcagggagatccctgaacgtatccgcacgcttatcaacggcatcgccggtggatttggcgcgaccgctaccctgaactggcagccgggcccgcctgcgctggtgaatacgccgcagtgggccgactttgcgctgtccgtcgccagagagaccggctaccagaccgaagtcgctacgccgcagatgggcggcgaggattttgccatctatttgcaccacgtgcccggcgcgtttgtcagcattggcagcgccagcagtttcggactgcatcatccgtcgtttgaccctaacgaggcgattatcgaccctgccgtggcctacttcaccgagctggcacagcgcgcgctcgaccaagtgcagcagcaaaataacaagtcatctttataagtcacctttggtaacggaaaattgccgctaaacggcgcgcctttgctggagctctgggtcaggatttgccaagatggcgaggttaatatttcaaaatttaccggatgaattgaggatatgactatgagtaacgacaagccactgcaagccgatccgctggtctggggacacggcaagaacgtcttcgaggtgtttctggaacccacctgcccgttttcggtacgtgccttcaacaagttcgatgccctactggcggaggtcggcgaggacaaggttacgctgaaaattcatttgcagtcccagccgtggcacctgtattccggggtgatcgttcgctacattctggcggcatccaccctgccggaaggtaaggaagcggctaaagcggtgttaaaggccgtggccgaccatcgtgaagagtttgagtttaccgatcactgcgcgggaccgaacatggacgccacgccgaacgacattctgaatcgcctcgagagctacagcggcatcaacgcccgtgaagcctttgcgcgtccggagttgcagaatgtgattaaatggcacagtaaatactcacgtcaaaacggcattcacgtttcgccaacctttatggttaacggattggtgcaggccgatattggcagtggcgacgagatttcgtcctgggctaaacgcattcagggataagcctcttactgagcccggctgtaagaagtttgtccgattttctcaataatcagggcggaagtggatgatttgccgatttcttcagcactcaaaccgaattatgaagaaaggcctttgacaagccgggctacccccgttagtattcgcccgttcaacgattcctctgtagttcagtcggtagaacggcggactgttaatccgtatgtcactggttcgagtccagtcagaggagccaaattcttgttttcatgcctctttgcgaatccttatgtgatttagattcaataagttagcgtgaaaagtcttcccgatgcattttcatttcccctccgcatcgggcaagattggtggtctgatttggggtcatttcagttcgattatggagtgaccaccatatgtctctgaacgacgctaaaatccgtagcttaaaaccatccgcaaaacccttcaaagtttctgattctcatggactgtaccttttagtcaatccaggcggttcacgtctctggtatctgaaatatcgagtcaatggtaaagaatcccgcctcggcctaggtgcctatcccgatgtttctctggattacgctcgtcagcaacgtgatggcatacgcaagctgctgacgcagaatatcaatccatcacagcaacgtatcgcagagaaagctgcccgctctccggaaaaaacatttaagcacgttgcattgagctggcataaaagcaacagaacatggtcagagaaccacgcctcccgtcttcttgccagcatgaacaatcatatatttcctgtgattggacacttgccagtagctgaactgaaacctcgtaactttatcgatctgctgaaaggcattgagcaaaaaggtctgctggaagtcgcagcacgtactcggcaacatatgtacaacatcatgcggcatgccgtgcatcaggggatgattgagagcaatccggcgtcgaatctcgaaggtatcatcgcagcaccggttaaacgacactatcctgcccttccccttgaacgactacccgaactgctgagccgaattgatggttatcatcagggacgggaattaacccggctggctgtttctctcaccctacatgtctttattcgctccagtgaactgcggtttgcccgctggacggaaataagtttcagaaacagaatctggactatccccgccacacgagagccgatccccggagttcgctattccgatagggggacgaaaatgcgtacgccacatattgtgccgctgtcacatcagaccatcgacatactgaagcagataagagaaatctccggtgatcaggagttgctgttccccagcatccggaatccatccagaccaatgagtgaaaatacggttaataaggcgctgcggctgatggaatataatactaaagaggatgtgtgcggccacgggtttcgggcaatggcctgtagtgccctggttgaatcaggtctctggtcactggatgcggttgagcgtcagatgagccatcaggagcgcaatagcgttcgggcagcatacatccacaaggcagagcatctggaagcccgcaaggcgatgatgcagtggtggtcagattatctggacagatgcagagaggaattcgtgccatcctatattttgggccatcagcagtccaaagtctgaacttcggtatataccgattgataagcttgaaaaagggctcagctaatgggccccgtttaagactaattacttcgcatatagagttaaaataccgtcaacttgatacagagtttggtttttagtcacagaatggagcagaatattgaatttggtccctcacaaatcaagcgcaattgcatctgtgttgggggtcaagtatttattcctaacgccgccagcaatgtactgattttaggcgaacgatggcgcgattttgcataaattaatgaaagcggaatcgacgcctcggagtattcttgtagtagctcgaccagtttaccgttttccagatatttatcgatcgcaaagtccattatttgaacaactcccatcccgcagagtgctgcctctaacagtacatccgcagtatcgacgaccagattacctttaatatcaaacgcctgctgttccccgctatataataaaaccactttgtgctacgcccagttttctgtgctttaacagccagacagttatgctgtaccagttccgctggctctttaggaattccgtggctgtttaaatattccggtgacgcaacggtgacaaaacgtaaatgcttgatggttcttgcgataagtcgtgagtcctgtacgctgccaattctaatcgccgcgtcaaagccttcttccaccaaatcaaccaatcggtcagtcataaccgcgtcaattgttaatgccggatatctgtccagaatctctttgagcataggaataattaccaatcggccataggcagaaggtgtcgttatttttagttcgccttcagggaaggccgttctgccgataatcgaatgccctacctcatccatttcatgaatcaggcttcttgaggattcatataaaaaaacgccatcggtagtcagacttacagagtgggtattgcggttaagcaaggtaacacgaaggtcgagctcaagtctggtaattgcacgtgagacccctgattgggtgaggcctaatgcctgcgcagctttggtaaaactctgcgtttcccctaccttgataaagattttaagcgcgtttaaatccataagtcttctcttacatctcttacacgaacatctatgcctcgtggaggtatcaagatacaaaaaacctgacagaagttaaatatcaatgtgttattagttaaaagataacgctatgtcgccacaattattgcaatatccttgcgtggcgacatctttgaggactatgtacgaattgagcttagtcctgaggtacgttgagcgtgactttgcctggagcgagaagatgcatgaaatcctgtttaatgactttatcccaactaccaatattattcgcgtatactttaataatcttctcgtcaacgagagtgagcaaggtgtttaaatcttctccggccggggaataatccttataagaaatcagatcgattcctcgtgataccaaaattgtggtgtctatgctcgccacctgtcccgaggcaacgcccagaatgagaactgtgccattagggacaacattgtctaatagatgagccagtaaatcgccaccgacggtatcgaccagtgcatcaaaggttccctcaaaaggatattctttagccaatagtacctcgttgggtttaacgtcgctggcttgcagccaatcgaatccacgctgactgtgcgccaccgccgaaactttaataccggcatgcattgccaactgaaccaacaaatgcccgactccgcccgttgcgccggtaacggccagagactggcccggcagcaaatgaagggatcgcagagaacgcagcgccgttaatcctgccaccggcaacgctgctgcaaccgctgctgatacactctctggcacgatagcgacattggcacgatcgacaacgcgatattggctccaggcacccgaaaaactccatgttaatacccgctccccaatttttggtccctgaccgtcggtgctggtctcaatcacaataccagatgcatcccatccggcaggcttatccgattcccagggaaactctaattctcctcgattaagtgatatattggaaactcggattaaaatatcactttccgtccttctgactggccgctgtacatcggtaaatctaaaaccaccagtatctgatttcacaattgcttgcacgtattctctcattgttattttccttttcgatatttacacattcagaaaaatcaattaaataacatttaaataaataactttatctatttttaagataagcagatgacattttaattaccataattcgatatcttaacctcctaacctaacacgacaattcgataaaccaatcgattatattggtgaaaaatgtcataacaattatgattcatattctgtttacaaaagctgataatcgagggtattaatttcagtactgttaatcacatcgagtgaatttttatgaacaaaccacttccagcggcaatatatattttaggttttactctatttgccatgacaacatctgaatacatggtcgcaggattaatcacatccatgtcatctgatttaggtgtttccattcctaaagttggatatttaattaccatttattcattaggtatggttttcggtggtcccttgcttgctacatttttagttaaactcagcaataaagcagcattattgactattactggcatatttcttgtcgcccaagtcgtcgcaaccgtttctgcaacttatgatcttttagcagtagcgaggtttgcgaccggattatcttcggcagccttctttggctttgctctgttaacagcggcaaaaatggttccaccggaacgctttggcattgcagcctctatagtattgggcgggatgatgattgcgacggtggcggggctaccattatcggcaatacttgaccagtatgatggctggagagtttccttcgcattaattattgttcttacagccttagcgggaataggtattatactgatagttcctaaatttcaggcggaggttaagggcagcattaaagctgaattcggctctattgtaaacagttcaatatggggggcatttattacaagcttctttattattgctgcaacattcgcgacattcagttacttcgttccctattttgaaaacacagtcggcttcgatactccatatatcccagctattctttttgcttacggagcattcacggtagttggtaactttctggtgggtaggctagcagataaatctccgattaaagttgttttcaccggtagtgtcgtgctggtacttgcactttgtgggctttataccttctacgataataaaatattagtgctgatatctgtaatgatattaggacttactggtattaccctcactcctgccatgtcctcacgcgtgtttaaagcagcacctaatacttcattaattaacactatgcatacctccgttatttgtcttggagtagttattggttcatgggccggtggctatgcaatcgaccaaggttatggctaccgtgcaccaactctcatcggtatttttttagctggattggcaattgtcaccctactccctgttttgagaaacaaccgttacgatacgcctgctgttaatcctcagacaaatatctgactgtaccaataggaatagaccatgaacagtgaaattaattcattaggctatgaaaataacattcaaactattccggaatcgcatttatttcccgaaaacaaatacaagcatgggatcccaatcatttaccactgcgagagtgataaaattatcgaccaaagctgcgaggcaagattatcagatgacacgcccaataaaaaatcattcacacataaaatatttgttatacgaaaatgcaagcctgagcatataggagacattttcctgcggccatcagaaaatgatggtagcagcataattctaaacattaatattcatacgccattaggagaaaaaataaaaaccggactattccgtaaactttcaattcttttatttgaaaaatataagacactgagaattgagactcacattttgattgatcatcataaaatcgttaatagccttatattgagcgggtacacttttgaaggtatttcacaaaaatttaattcaaattcagagctagaggaatttgcagtattttcattattgaagaatcaaactaatacggaaaaaagtctattatttcctgcagtggatagtaatatttatcgcgatgaaaaaattgcactacgtttagctgaaccaaaagacacattttgtatatggttagagaaatcaaatcctgaatcatcgaagtggggtttattcgaaacagcatcgcttgatgaaataaaacaaaaaattaggcgttgcgggcttaattcagccgtaggccctaatatattactaactattatagaatgctcaactggtaatgctgtaggaaaaattattatccgcaatgttgtaccacctcatgtaggtgatgttggttacgggatattgccggaatatcgtggtttgggctatgccgtaagggctctgaatcttctgaaaaaatgggtctttaacgaagctggctatgtccgtttagaacttggtgtcaaagaaggcaatattgcgtcagaaagagtcgcgcaaaagggagggtttaaatttgagggtgtgcgtccggggagattaaaaaaccacgatggttcatacagtaatgaaatgcactatttctttcttaacccgaacgttagctatcgcaaaataggggattgaaaaatgagcgaaagttttatctcatttcttgaagagcatttagatcatagaaacgtcgtcgcctatgtaaatacaccgaatgatgttggcgaatatacttccccatctgtttctggccgggtggatgtttccagtattgaacaagtaattcgcattgttcagctggcagatcaatatgatggagaaacagcgctttatccctactcaactggattcaattggggttaggttcaacaaaacctccatcagataacaccgtgcagttaaagctcaacggactaaataaaattcgcgagattaatatcgcagagggttacgctgtcattgagccaggcgtgacgcagggaacattatcgcgaaaattacttaatactaatcgttttattaatgtcacagcctcatctgcagaaacgagttttttaggtaatgctcttgaccggggcgtcgggttgaggcaccaactgacctgctccccgttgattaacacagcgcgatgttagtaatgtcttcataagccacatgaggacatcccatgaagaagcgtttttccgacgaacagatcatcagtattctccgcgaggccgaagccggagtttctgcccgtgagctctgccgtaagcacgccatttccgacgccaccttttacacctggcgtaaaaagtatggcggtatggaggtgcctgaggttaagcgcctgaagtcgcttgaagaggagaacgcccgccttaagaagctgctcgccgaggccatgctggataaggaggcgcttcaggtggctctggggcgaaaatactgacgacagaccagaagcgcgaagccgtggtgttgatatgtgatgcgaccggtctgtcgcaacgacgtgcctgcagacttacaggtttgcccctgtcgacctgccgctatgacgctcagcgtccggcggctgatgccaatttatcagggcgcattactgaactggcactggagcgcaggcgttttggctaccgccgcatatggcagttactgcgccgtgaagggcttctggttaatcacaagcgcgtgtaccgcctttatcatctgaacgggctgggcgttaaacgcagacgtcgtcgtaaagggcttgcaacagaacgtctgccgctgctccgcccggcggcccccaatctgacctggtcgatggatttcgtcatggatgcgctggctaccggtcgcaggatcaagtgccttacctgcgtcgatgacttcacaaaggaatgcctgacggtcactgttgccttcgggatttcaggcgtgcaggtcacgcgtattctggacagcattgcgctgtttcgcggctatccggctacgataagaaccgatcagggcccggagtttacctgccgcgcgctcgatcagtgggcctttgagcatggagtggagctgcgacttatccagcccggcaagccgacacagaacggatttattgagagttttaacggacgctttcgcgatgaatgcctgaatgaacactggttcagcgacgtcaatcatgccaggaaaaccatcagcgaatggcgtcaggattataacgaatgtcgcccgcactccacgctgaattatcagacgccgtctgaatttgcagcgagctggagaaagggtaattctgagagtgaaggttccgacattactaactgacggttgtatctaatcccgggggcaggtcatagacatggttaaagaacgtaagggctccagtcctccctaatctgagatcttatccaatccgaattcttcgactacacgaatagtatatttcttactgcagttcctaaagatgaggctttttctctgaaaataaagggggtcattttaggggtcttgactggaagggatttctactctagcctatttatcagccacatactggcaaaggcgatcccagtcagaggagccatatttatgttctcatgcatcttcgcgagtctttatctcatttagactcaacaaattagcgtgaaaactcttcccgatgcattttcagttatccctctctctcgcaaagtttccgcttcacactacctatacctgttaatcaatctcggcagttctcctcagcgttatcccaaccatcgcatcaatacgcctaaaaactttaggcatccttgcccgaaatatcccgcgttacgaacgcagcgccaaagtttcctcgtttttacccatagagcgtttgtgatgcacaatacggctggtgaccagtacggcgagcgttaacaggccggtcgcgatgatttcactacggtgttgtgggttgaacagcatggagatgagtattccgacgatgaacaccatggttgcccaggttaatccagggaatagccacatgcggtaactcagtgtttcaccgcgcgcctcgcgttttttacgcaacaccaaatgtgaggcggcaatcaccagatagaccagtaaagcaatggcgcctgaacttgccagcaggaattcaaagaccgctgcgggtgccagatagttgcaaatcaccgcaatgaacgcggctgccgtggaggcaataacggcaacccacggggtaccactgcgcgtggtgcgagaagcagcagcgggtgcatcctgacgacgtgacagcgaataaagcatgcgtgatgcggtgtagagtgcggagttaaggcagctacaaacggctaccagcaccaccacatcgacgatttggcgcgcatacggaacattcatcatttccatcgctgtttggtatgaaccggctttcatcagcgacggcgtattccaggggaccagcgcaaccacaatgaaaatcgacagcagatagaacaacgagatacgccagataaccgagttggtggcttgggtaatctgctttttcggctcacgcgattctgcggcggcgatggtaacaatttcggttcccataaatgagaacatggtcgttagaatggctgccagtaccgcactgatgccgttaggcataaagccgtgggtcgcataaagatttgaaataccctgcgtactgctgcccggcatgagtccaaatatcgccagactgccggcaatcaggaaagcgataatggcaaccactttcagtagtgcaaaccaaaactcaaattcgccgtagttcttcacgctaaacaggttagtcaccgtcaggaatgtggtgatcgccagcgtgtattcccaaattgcaacctgcgggaaccagccgtgcaagatagtgcctgcggcgttggcctctagcggaataaccaacacccagaaccaccagtagagccagccaatagtgaaaccggcccagcgtcccagcgatttgtcggcgtaggaggagaaggatccggagtcgggtgaggcaatcgccatttcagccaacatacgcataatcaataccaccagtgcgccggccgcgatgtaagccagtaacacggccgggcctgcttcggcgatcgcatggccggagccgacaaacagtccggcaccaatcacaccggcaatagataacatccgtacatgacgcggcttgaggccttgcgccagcacatcggcattctgtgaactcattgttattctccagattgtctctcgggttgtgctctgtacagcccggcagcagcagatgattagcccagaccgcagtgcgggctgggttagttgaggaatgcctatgaatcctgatatggcttcaatatgccgctgaggatgtccagcgccttgctgaactgcgcatcaggaatggttagcggatagaggaagcgaatcacgttgccctgcggaccacaggtcaacagcaataaaccacgcgccattgcctgttgctgaatcgcctgagccgtttgcgcctgtgaaaactccacggcgaccatcgagcccaacgcgcggatatcggtgatggccgagcagttggcacgcgcactgctcaggaaatcgaccaactgagctccgagtcgtaccgaacgtgcacaaagctgctcttcggcaataacatcaagcaccgcatgcgccgccgcaattgccagcgggtttccggcgtaagtgcctccaaggccgccgggacccggcgcgtccattatttctgcgcgaccgcttaccgccgacagcggcatgccccctgcgaggcttttcgccatggttatcaggtcaggtttgacatcgtaatggtccatcgcaaagagttttccggtgcgagcgaagcccgtttgcacttcgtcggcaatcagcagaataccgtgctcatcggccagattacgcaggcgagtcaggaactcaggcgggcaatgtggaagccaccctcgccctgaactggctccagcacaatcgcggctacgtcctgtggtgcaatatcctgggtaaagatatcctgcaggctggcaagtgcgtcttcaacgctgataccggttatcgggttcggataacgtgcatgccacaccgaggcaggcatcggaccaaagtcgcgtttatacggcgccactttgccggtcattgccatggtcatgaaggtgcggccgtggaaggcgttgccaaaggtaataatgccgtgacggcgcgttgctgcgcgtgccactttgacggcattctctaccgcttcggcaccggtcgagaagaaggcggttttagctttaccggcaattggcaccgcgctgttaatgcgttctgccaacgcaacatagctctcataaggcgtgacctgaaacgcagtatgggtaaatttttctaactgatcgacaatcgccttaacgatgcgcgggtggcgatggccggtgttcagcaccgcgataccgcccgcgaagtcaatccaggtattgccctcaacgtcacgcagcgtcgcgttctctgcctgctcgacataccactggcaaagatttccggtgccgcgtgggagtgcatcatctttgcgttgttgcaattgaccgtttttaccttccataacttttccttagcaataagagtctttacaaatcacgacaaacacgcttatttatccctgtgccaaggtttgttgccagagccacttctatagaaaagggaggatccaattgcggagtttgtacgccgatcatgtattagagcgtttgcggtgtttgccggaagggacgctgcaacagcgcctgttggcgtgtatgcaggctgcgattgtggagggaatatttccacgtgccacgcgattaccggctacgcgggatttagcgcgcgaactgtcggtttctcgcaataccgtccttaacgtctatgacaatttgatgtcacagggttacgtcacggcgcgaaccggtagcggcacctgggtagccgaaacgctgccggaaaggtgtttaaatagtccgcgtaacgacgctctcagcctaccctcgtcgccaaaagcgcggtcatctccaagcgcggctcgtccttgttggggcatgcaaacgcctcgccgtatcagtggggtgcctttgtgccaggcgcacccgatgtcacccaatttccacataaactttttagccaaattcaagcgcggcttaataaagaacccgatatagacaggcttatctacagtagcaatgggggctgcacgtatttgcgtcaggcgttggcggagtatctcagcgtttcgcgttcagtacgggccgatgccgaccaaataattatcaccgagggaattcatcaggccgtggatttggtgacccgcgtgctgtgcgatccggggatctggcgtggatcgaagaaccgggttattggggaacacgtaacctattgcgcatcaacgggctaaaaattcaggccatgtcagtggatgaacagggcattatccctgacctaccgccgcgaacccctgtgccaaaaatggtttttatcaccccgtcacatcaatatccacttggcgtacatctcagtcttgaacggcgaaaacagctcctggatttggcgcgcaaacataaaacctggctagtggaagatgactatgacagtgaatttcgctttgccggtcaaccctttccatcgctgcaaggttttgagcctgatgcgccggtcatttacatgggcaccttcagtaaaacactctatccggcactgcgcctcggttatctggtggtaccaaaagcattagcgcaacccctccgtgttgcagcggctgagctctaccgtggtgggcatctgctggtgcagcgtgcgctggcggaatttattctaaaagggcattacgtggcgcatattcgccgtatgcgtaaactctacagccagcgacggcgctttttggccaacttgattgaacgctacttaggcaaggattttatgcctcaggtgaatcacgaagcgggtttgcacctggtgatcaatctccctaccggctgtgacgatgtggcggttgccgctctggcgttgcagcgtggcgtaaaagtgcggcccctgtcgcaatattatatgcatctgcaagagcgacgcggactgctgctgggttatgcctgcgtggatgaaaggcagtgccaggatgcgttcggcgtgctcagagcgtgtttgattcagtttgggattgtcgggcgcgcggaaagccttaagtcggagggttaactgattaacggcgggatgcgcaatcaatcgcaatctgtagcgagaagccacagcatctgtcgcttaaatacaaaacgcctgatgtaattgatcaggcgttaggataaagagaaagtatcaaccgatatcagaacgggtcacaacattacctaccccaggccgactctgtattcatatgctcggctcgccagtgagtataaaattcgctatcatccgctcccgctcttcatcccggtagcctgatgtccaagataatcgatacttttattgccccgccttgccatgacaagattgagattctctatcaggacgatcacttagtactcatcaataagcccacaggactgctcagcctctcggggaaaaatccgcaaaatctggattcagtgcattatcggctggtagagctattccccggctgcaccctgatccaccgcctcgacttcgggacgtctggactgatggtgattgcccgcaataaggctatcaatgccgcactttgccagcagttcagcgagcgcacggtgaccaaaacctacagcgcattactctgcggacatctggctcacaacgaagggatcatagacgcggcgattgctaaagacccggcgctatttccgctgatgtcgatttgcgccctaaatggcaagcctgctcgctccggttatcgggtggttgaacgcttttatcatgcgctggaagacgggagattactgccattgacgcgggtccagctgactccggaaaccggacgtacccatcagctgcgcatccactgtcagcacctgggccaccctattttgggctgtgacctgtatggcggtctcctgctgcccggaaccgaacagactcctcgcctgatgctgcacgccagcgagctgcattttattcatcccatcagcggcgagcgtataaaagctcatcaagccagcccgttctgactttctgcttaaactgggggtgagtgggaagggattactgtgctttgcctcagggtttaataactcgcctgccgacatcaaatcgtccaaattttagaagggtagtaacgttgcgataataataaacaacctctaaattaactcttttaatacatggagttatatcaataaaatgcttacgcttgaaacggttgaagtccacacggctggagagccttttcgtatcgttatttcaggcttaccggaagcacagggtgacagcattgcagaacgcagaacatggtttcgccaatatgctgatgatattcgccaggcattaatattcgaacctcgcggacatgcagatatgtacggggctatcttacgcaggcggtctcccccggtgcggacattgggatggcaatcatgccaatggtgtccgttttattaatgcgccgtcttttatttatcatcgcgacgtaaaagtcagcacgcccaccttcggggacgtcatcggcgatatcgtttacggggggtattctatttttatactcgcggcaaatcgcatggattaccaatacgtgaatcctcaattgacgctctcacgcaatttggtgccgaagtcacccatgccgcaaatactaacttcttggttaaacatcctgactccgctgaggaaggcgtaatctatgggacagtgattgatggtgagcccaggcatgccggatcgtctcaggcaaactgctgtatttttgctgaccgtgaggtagaccgttctcctacaggaacggggactgccgggagagtcgcccagctgtttctacggggtgagcttcaacgagacgaaatattggtcaatgagtcaataataggttctgtctttcgaggaagggtcatcggtgaaacaacggtcggggattttccggcaatcatccccgagatatcgggcaatgcttatctatatggattctgtaaatggctcatcgacccacgcgacccttttagaaacggatttttagtcaagtagtgtgggacaatgaaagctggcgctacaatgacgccggagctcgtactgtccgaagtagacttaccgaccaataatacattagcgacgagttaccggcgtaaacattattcacgtggggctttactcatcaatcgagaacagtttctgtacggttgttaaaagattgaaaatgagaaagataattgacaatacttgactataattataaaaaatagagccttaacaaccaagatgattactacatgaatttttatggtataaactacctgcaaacgcagtctaatttaaatgattacttcaagtatgcgattatttttagcactctgtttgttttaattgtcgtattcagcctgtatatgcgtcatcgcctacagactaaatatcgagacttaacgattatcgccttcttgtttttgctgtttatttccggcgttcaatactcagactacgcaaatagtgaaaatatacactctcaatcatcgcaaatggttaattttgtaaaactcctcgccagggaaaagaatgtaggggttgatgctatcctttccagttcagtgcaattatctgatggtgtgattgttaagattaatgataactattatcgcgtaaatttaagcgcagatcaaaacacttacagcttagtcaggatcgggttaattaacccggacattaccattataaaataacgagggactacatgcctatctatacaccgataataataaaattagggctaggaatactttgcctgattgtacaaataaatctgatggggaaaggaaacttagccccatcctctgcaatggatcaggttcaaaactacgtattaggcggaattatcggtggcgttatctataatgaatcgataactgtgctgcaatttgtacttgtgttaatcatctggacattgctggttttcattctcaagtttttaaaggaaaataaccgttttcttaagcatattattgatggtaaaccgattacattagtgcacaacggcagtgtagatgttaaagagtgtttaaggaatggcgtttcggcccatgatttaatgtttaaattaagatctaacggtatatatgaagttgaacaactcaagcgcgtagtgcttgagcaaaatgggcagttaactattattcaaagtggcgatgagaacattcgttatccgataatagtggatggattagcaaaccatgacttgcttgagataattaataaagacagagagtggttagaatctaaaatcgcagagcaaggcttcaataaaattagtgaagtctatttaggtgaatatttgtctggccggattaatttgtacggatatacaagataaccgtcggattgaaagttgatgtgaggttgctaatggcattgttagtacgactcattttctaaccttaggtatgatttgcatccaatgattaatacattgaggtgatagcaacgtccactttttgcaaaaagcggcccaaggcaacgcacaagggctgctgtgagcgaggagcggacgtcggctcttactcgtcattttgatgtaatatgactgagcatgtgtctaactggcggctattttataaacagctactgtcaggtattggatatatcaactctatctctggagcgtcagttaaatgcctacctgatctagccatcaagtacccagcaatctcgtcaacactgagatcaacatgtaacatctcaggattctggaaccaactatctggccaaaaaataagatcagatggattaccgttaaaattcctctcaagtaatgaaagagcaaagttttgttcggattctttgccctcggagtcacatataaatttgattgtttgaatcaattcgctccaggtatagtctgggtaaaacctctccagattaaaggccatcctggtaaattccctggcacgggtccaggaggaaaaatctctgaaatcagaaaaagtatagggatatacaacctggttgttccattcgcccatcatggttactaatatgggatcttcttgaacagagcctccatcaattttagaaagtatcatttcagcactttttgaaagttcattaattttattactactgactttgcctggtctcattctttccggcagtggcattattttaatccttgagaagttaactcatcaaatcgattgattttaaacaatactctttatgtaaatacggtactaccttagtccgcttctggctcatggcatctcgatgaaacctacgtaaaggtcaacggacgcgatgcgcctggtgagcagaatcattgaaagataagacttttcaataacacgaaaggctaactcatcaataactttgcaacagtgccattattattaagtctggcactctggatactatttcatactttagtcagcgtgtttatttttccatttcagctcaacttccataacgacacttattgatgcaggcaacacagtcagtgtaatgagcgtggcaacaaacaagcctccgatgatggcgtaggccattggcccccaaaaaacctgctccgagatagggatcatccctaaaattgccgctgaagcagtcaacagaatcggccgcgaacggtgaagggcagcgctgacgattgcgttttgttgcgccatcccttcacggaaattactgtcgacctcactaataagaataacggcattgcgaataatcatccctgacaatgcaatgatacccaacaaagccacaaaacccatcggcgttccgctgggtagcatcgcaagcacgatgccaattagggcaaagggagccataagcaaagcgacaagcatgcgggaaatactttgcagttgaatcattagcaataccagcatgacgaataaagttattggcaacactgcgtaaactgaattgttccctttggctgattcagcaacagtgcctccctcttcaatgttatagccttcaggaagcgaacggcgcagtttgtctaccataggagagagttgctttgaaaccgactcggcttgcataccaggtgccaagtcggtttgcactgtgatgaaaggcaatcgctgtctgcgccagataatcgggtcactcacgccccatctcaacgttgccacctgacttattgggactttgcccccgttggtcgatgttaccttcagattggcaagcgtatccaaatcgagtctctcatggtcattggatcttaataccacgtcaattaacctattgttatcacgcagggtagtcaccacgcttcctgaccaaacagtatttagcacctccgacaggctctcggaagatacaccggcggcacgggcagccgtttgattaacctcaagcgtgacgacacgctcgggttctccggcagtaagattcacctctcgcgtcaagttactgttgcctacgatagcctcaagatgctgtgctagctggcgaacctcgttgtagtctggtccactgatgcgatatttaagcggccatccaacgggtggcccgagttcaagcggcgacactcgcgtcgtgatatctctgaaatctagagcaagatgtgaatttaactgctgctgaagcctgtctctgtctttcaggtttctagctacaacgactagctgggatgtattttcgttatccagtaaaacctccatgggtaaatagaatcttacagccccagaaccgacatagcttgagaagtgatcaacgtatcgattcttcttcagccaatcttccaatctgcttgtttgcctggatgtttctaactgcgatgcattggcaggaagcgtcaggctcaccagcagttctggcctgtcggaggctggaaagaactcccctgcataaaggtggtgccataagctgatagcccgagcagaaaaacagcaatgaaaagagtcaggccacggtgagccaaagtggcgtctactattcgttgataaaaatgaagcagtcttccgggggagccgctgtgtggttttatttttggcgataagatccaagtgccgattaagggcgaaaataaaaccgcgacggcccaggaacttaaaagtgaaatcagaactacggcaaacagtgaaaagcaatactcacccgcgctggatgcagcaaaacccactggaataaatccggcaatcattacaagcgtaccggtcagcatgggaaaggcggtagtctcaaaggcgtaagtcgccgcgtgccagcggctatctcctgcctccattctggaaatcattgcctcaacagtgatcatcgcgtcatcaaccatgagtcccagcgcgataatcagtgcccccagtgaaatacgctggagcccaatccctgttagcatcatgccaataaacgttatggccagtaccaatggaatagccgtggcaacgacgagcccggcccgagttcccaaagatataaaagagacagccaaaacgataataacggcttctaccaacactctaatgaatccgtttaccgcctgctttacaacagcggactggtcggcaaccgtagtcatctcgataccgtgaggaagggcatgtcgaatagcgttcattcgcaggttgagctcacggccaaaacggagcatattgcccgttttggccattgagattgccatgccaatcgcaggatgcccgttaactctgaaggccggagacggcggctcggcaacctgccggctaatcgaggcaatatcagttaaggggatgtaacgcccgtcaacatgcaacgttatctctttcaggctttgctgcgtactcagcgccccgctcacatggaacgtaatgttttcacgatcgccgcgcagcgtgccgctgggtactactgcgttttgttgcttcaaggcatcagagatttgttgcagggtgatccccattcccgcaagctggcccggtgaaaaagcaacgaccatttgttcttcttgcacacccagtagactgattttccctatattgggcaatgacatcagactgcgttgaatggcctccactctgtcgcgcaattctctttctgtaaaaccatccgcagtaaacccataaattgtgccgaaagtgtcgtcaaactcatcgttgacggtaggtgccaggacaccggcagggagcgagggagaaatatcctgcatttttttgcgcacctgataccagatatcgggtacggaggctggcggagtgtcctctcgcaaataaacaaatataactgactgccctgcccgcgtgttgctttcgacataatcaaggtgaggaatttcttgtaacttcttctccagcacatcggtgacaagattaacggtgtcatgaacattggctccaggccactgagccgaaactacagcagtctttatagtaaacgccgggtcttcgttacgattaagattttcataccccaactccccgcggccaacaatagcagcatgaaaaatgtgaccacttgctgatggttaagcgcccaggccgaaagattaaatgcccttttggatctattactgttcattcttggccctccccaaggctcactttctccccttgacgtagcttgctcactcctgctgttacgactgtttcaccgggccggatccccgacgaaatgaaaacttcgcgggtagaaaatctaccgataattaccggacgcatttcaagttgcagatttctgcgatcaacgataaaaactgccggtgtccctcctgactgggaaagagaagaagccggaagccgaatcccccgagccctgtttctggtaatgacgcttgtacacttgcgccaagagccatcgcccgcggggattgttcagcgaaattcgaacgcgccaggtacgtgtttgaggatcagcctggggacttatatcccttaagattccatgggttgtaatggcgggatcggagagaagggaaacattgaggctttgaacatttttcagagcccgaacctgagactccgaaaggtcaaatactgcgtcgagctccgtagcttcggccaagttgacaacagtctgccctgcgccaacgacttgcccggacgaggcgctaacctgggttattacgcctggcgcaggggcggtgagtcgagtccagtccaggttctcccgcgcatttttcagagcattttcacttgtctgacgatgagataaagcggattgccagtctgccatcgcattatccagctgcacccgtgcaatcgccccgaaggcattaaaattttcattcgtctgagattggctgccgccacctgttcgcgtacgatggcactttgcagatcggcgcgagcactgttgaactgattttcgccggtttcactttcaagggaggcgagtagttccccctttttaacctcgtcgcccacctcaacacgtcgagtaagcagcctgccgccaagacgaaatcccaacgtaagctcgtcgtgggcacgaatttcaccggtttggttgtgaaaaattgacaatgtaggttgaggtgcaatcacaaaacgcactggccgcggcgaaagagcaaccttttgctgcttttcaccacaactattcagaccgattaaaaaagacagcaaaataagcccaattaaaaaatgagttattttacaagatgaaatgatatggctaattgcctggcgagctaaatctgcaaaagtgtctgtcatgaccctgcccctgaattgatataacgctattcaatccagcattggtccagattccccctatatttcatcaagggaccgtcaagactgacacttttttatttatttttccttatcgggaaattgaatgacgacttttagcccgccattttctgcattttgggccataattctgcccccatgagattcgcagattgctcgggctatggacaggcccaggccactgccgccaaaatgacgggcgcgcgacgtttcagctctggtgaatcgttcaaacatcagcgggatgaaagcttcagacacccctttccctttatcacaaaacgaaatttgatacgcatcggtcaacctttctacataaatatccagggtgccgccttccgaggcatagcgtagggcattttccatcaagatagtaaacacctgccccaaccggaatggatcacctttgaaacggcacttagccggtgcatgaacagcaataatcattcccgtggtctcagcttgcggctttatccacatcacccgctcctgcaacagctcggcgagatcccactcaaagatatcaaggctgagctccccggcatctgccagcgaaagcaggtgcagttcatctatcagacgatttaaactgactaactgtttcatgaccatttccagctgcctgggttctggctgaaatacgccgtcgatcattccctgaagtcgccccatcgcggccgtgagcggagagcgcaactcatgtgccatcgcgacatgggaggcatgcagctcgcgctcgtagcgcgaaagttgctgaaccatagtattgaaatcttccgtgaattgaaccagctccgagggcgctcctttaaccaatgccgcctgagtttcaaagtcacctctggccacttcacgtgcggacgaagccaagcgactaaattgtaaagagagcggcagagcagatcgcagcccaaaaaaaacaataaatgggatcgtcacaacgaccaaaatcccaacggtgatccagtcggcggaagcaatcgagggatccgaaaaacgtataccccaccatttatctacaatttgatgaaaacgttgaggattaatttcaggattcagaagcagtattttaaactctgcactgactgaagaaggcatttcatgcactcgcaacagctcaaccagcgcgaatctagaccacatgcacagggcaataaggcacacagagccaatggcaagcagcaggatacgcacacaaatccagcgccatagagattgatgtcggctgttcatggttgtctgaaccggtaaccgacactgcgcacattgaccagcacatgactaatgcctgctgactccagtttcttacgcaggttataaacgtgtgtatccaccacgcgctctaacgcctcgctctcaggcagacaattttctaaaagatactgtcgtgaaaaagcccgtgttgcagaactcatcaaagtagacaggatactgaattctgtgggtgttaaattgagatacgatttgctctcttgctcaccgttaatgcttgcggtcaaggctatgacatcgacttctaaattctgccagcgcaaaaccacctgctcctggccttgagcattgcccgaagtcctgcgcagcacggcttgtactcgcgcgacaacttcaccagggttataaggtttgactacataatcatccgccccataacgaagcgcaccaattttatccggcagatctcccatggcagttaccatgataaccggggtattatttttacggcgcactgacgccaatacttccgtcccactcatccccggcagcatcacatccagtaaaataagatcgggtttccagcgcagtgccatatcaagccccgagagaccatccccgacaactgttacttcgtacatttctcgtattaaatatgcttccagaacattggccgcatcaacatcatcttcgataatcaggatccgcttattttgcatatttactaccttgactgtttctcgataattccctgacagtacattgatactgcctcttcatactctgagtttcatacgcggccgtaatccgctttgatttgcgagtcatgagtgacgaggttttataatgataaccagaaaactactccttcacattacctgttttttatttgcaggaaacgtaacaaacacattagcggacaccaacgctgctagtcagcagagcttaaatcttggcctggcgatgcaaaattcccctcgctacagcggttctgaaaataaacattggcaatttgctcctgttgttcaggcacgcgatggtgcttttttctttgattcgcaaaagggagtgggatatgacctgcaaagtgacagcgggttatatctagaacatacccttggatatagccttggccgttctgacagcaattccaactggcgagatggttcagatagattgaaggggatgggaaatatcaatgcgacagtcaataccgtcgtggctgtgggttgggccgttacaccctggctttcattggagggaaaaaccatcttgcctctcagcgatggacagggtgtgaaataccaaacgtcaataactcttctccccatacaaaatgaaacaaatactgttgctttccaaggtgctgcattatttggcgatagccgatatatgaataccttttatggcgtgagtcgcgatcaaagctttcactctggatatgctcaatatcaggcaaacagtggattctatggtgtggatagtactcttacctggagccatcaattcaccccgcactggagcactgcagcaagcatcgaatacactcgtctggataaacacgcaaaagacagcccgattgtgttcaaacccaaccaggtctcatcgacaattgcatttatctataacttttagtcttgacacaatcttgattaaaccttgactatttattgactctggaaatttataatatcggtaagctctgccgtctaagagtagggtttaacttaaaaaataaattaactgtcattacaccctgattttttttgcattaattgttaaacccaacaccaaagagttaataaatgagcttagataacaaaacgttaagtgcaaaactgaaaaatatttttttactatcaaaagttgataacaccaagcgtgttatcattttacaaaatgaagactctccaaaggagatattatcttttgccgtggaagctctgcaaacacttggagcaactttgcatgttattacgcatgatccgttaagaggctcctatactttatcatctgattataacttaaataacaatgatgttatttcaaaaaactcttcagaagatttgctaggattggcagatatagtttttgaaacaatagacttagcaaaactcagcgctcaaaatgaaaacgtagagtcattatctttaattaacaaatagaatttataacaattgtagtggcatagtgaatttggccacctgaacagaggtgatgtcatcacctcatagacaaaacaggtgacattatgaccagaaataacagacgttatttcagccccgagttccgcctcgaagctggccatttaggggcagtttggatatcgaaaattattgtacgttaaggtgatgttttgggcactgttgcaaagttattgatgagttagcctttcgtgttattgaaggtcttatctttcaaagattctgctcaccagacgcatctcgccaaggggatacccaaaataaaatgattctgcctgacctttccttagcgcacgcatcacttcaatccctttaattgtggcgtaagccgtcttcattgacttgaagcccagcgtggcgttgattagccgtttcagtttgccacgatcgcactcgattatattattccggtactttatctgccggtgctgaacatgctgcggacatttaccttcccgcttcagcaatgccagcgcccgcccatacgccggggttttatccgtgttgatcaaccgtggaatttgccagcgcttcgtattgttcagaagtttacccataaagcgatatgcggctttgatgttacgacgtgaagacaggtaaaaatcaatggtgcagccctgctgtcgaccgcgcggtacaaataagcccagcgtccgttgaccttcacgtaggtttcatcgagatgccatgagccaaaaccggaaggctaacgccagtacccgcgcagccgcttttccatctcaggtgcataaggctgaacccagcgataaatcatggtgtgatcgacatttccccctcgctcggcgagcatctcctgcggctcacgataactgatgccatatttgcagtaccagcggacggcccacaggataataggggtccgcttggaaaacgaatctatggtcactcccgtttttgcaacaccgattttgacgataaattggcttgcttgaatctatccggcgtctgaatgggattttattcccgcgcctcgatgagttccgcgcctgatgaacctccagaaaatatacggcttcaatgagcctttccgttttacaggttcctcaacagaccggtgggccgttagtatcatcaatatcagtattcgcaaaaccagatcagtgattctttaaaccggtgtatttctgccgttatgctacataagtttgctgtcgtgccgttagggccccggctattctggccagcttgtttgccagagcacaagtgacgacaaagttgcttttcctacacagtaaatccctaacccaatcggccaatttgccagactggtgttccagtttttgtatgaataccctggcacattgaactaacaaagttcggatctttttgttacctcgcttactaattcccagcaatgtcgtccgacctcacgtgctgtactgtcgaggcactagccctgttgccgccgcaaagtcacgactgcaggcgtactgcttcccgtcgccaatctcagttgaaatagtactcgctgtcagtgttccgacgcagggaatgctcagcaagcgctgtccaatctcatcttcgtccaactttcgtttcaactgggattccaaatctttaatctgctcaacaagatattgataatgctgttgtaatttcagcaataactggctgaggtaaagaggcaaactattgtcttcaagaatggtactcagtcggctaataacggcagctcctcgtggaacgctaatgccaaattccagcagaaagcatgcatctgattggttgtttttaccttatcctgaaccaaggattcacggacacgatgcagagcccgcattgcctgctgagattccgttctaggttgtacaaaacgcatagacggacgcgatgcagcttcacaaatagcttcggcgtcgacaaagtcgtttttgtaacttttaacgaatggacggacaaattgtggtgatatcagctttggaaaatgccccaacttttccaacttgcgtgccataaagtgagagccgccacaggcttccattgcgatggttgtagcggggcatgtcgccaaaaattcgattaactttggccgggtaaattttttacggtaaacagccttgccgcgacgatcttggcaatgaatatggaaagagtttttacccagatcgataccaatgagcgcaatgttttccatgatagttctccgaatgaaagcctatcctcagcatagtaccgggaaggagggagtgaccatctcattaaatatcctacgctaagacagtttctttagcagccatgaccggcagctttgagcgaagaccggacataccaaaaattcataagctaaataagacagcaggccacattctaatattgactaaatttcaaaaatgaaaaaagatataaacttagttgtaacagatgctctcttagtaaatctgatagtggcaaaactttctaaaatcgtctgctaggaatatttataccaaactaagtctatagggagttataacttgatcaaagcattaatggttgacgttgatggtgtgttagtttgtggtcgtccaattgatagtaatccctgggcttcttgcctcgatacagatcttggtttaagtgcagcagatttacatcgcgaattttttcttccgtattgggatgaaatcgtcgtgggaaaattggggctagtagagtcgttggaaatctctcttcctaaaattgcacctgaactatctattgagtctttagtaagatattggtttgagaatgattcatttataaatatgcagttattgaatgaacttaaacggtatcgtgctaataatataaaaatttatctcgctactaatcaggaacatatgcgggcatcatatataatgaatgagctagccttaagcaaatacgtggacggaatctattactcagcagcattaggctacagaaaacccagtgaagaattctttaaagcgataacatctctttctgggttttatccagaagaattattattgttagatgatacacctttaaatgtatcgaccgcccaaagtttgggttggaatgcatgcctatggactaacgattccttcttggaaaaggaattattaaaagtttctgagccccttaaagggtaaattgataataatgactggatagataagtattttgacctgctccccaataaatcgacaaccatgatgttagcaacgtccgctcctggcacacagtggacagtcaggctatccgctgaaagaaacattgccaatgattcagactatacgtttctgagggtaagagacaatttatgtttctggtagatcaatgataaccagtgtgccaaagctgccgatttccacagtatgaggaacgcccgctttggctacataaagctcgccagaccttacagagatttttttacctttaacactcagttccagacgtccatcaatgaccagtaaccctcgtcatactcatgtacctcttcagttactgagcgtgcatccattcgtaaaattttgagatttgcttccccaattcggcctaatacttgagagtgccaggcctcagttaatgcatttgcttcggtcctaaggtcataaagcgacataaggtcattccctttgatattcatttagtgcatttatgccatataaattccattttgccacataacaaataaggaaaagcaagtcgaaaaaaggctatatcttttctcagtacgctattaattctgaagtgccagaatattcattatgacctagccagaacgataattatcgcagggtcgatggagtaaacgcgtccgcttctggcacttagcaaacgaccgcgccgagtgccgtcagctaaaaaaggcgtatgcgctttaacagggctcattaaggcttgctcaatgctactcgtgcatattctaacgcgatgaccccatttcatcgaagacatgctagttcttaaatgacggaaatactgcgcgtttggacgcttcaactaaagtatggcaataattttcatcgccgccctttacgatgaaattctggtttgttatagaacttaaaagcgcgttcattctgtccaggattgacaccgaatctgactaatcatgttggtgtccgcatttgactgaagcgcatgggttgcctcccagttttgctaaagccttggcatgacgcagcacctgacgcgcgtccagaggtccgccgtgccccatgtggaaacgctgtccgcccttttccaccatgcgaattagttcacgcgacacagtggcgggatcatcttcgaacggcggccggattgcgcgccccttcaggatcacgccaccgatcagaatgcctgaggcgatcaggtctcccaccatcatatcctgcgaggagagctctaccgcgattgagcccggtgtatggcccccggtgtgtcgcacggtaccctctacgccaaaatcgagaagattgaacgcattgccgttgttcatcatgatgtcagggagaaaaccttcatactgttcatgcggaactggcgtcttaagaaacagtttaccgacccagctcgtcgtgcaataggtcatcggctctttgcggctataaaaagctgcgtcgtcctgatgcgcaagaatgggcgcacccgataattcgcgcaaccgtacggcgctgccagcgtggtcggtatgggcgtgcgtgacgacaatcagtttgatgtcgcgaaacgtcaggccatattgggcgagcaccttgccgatcttgagctctgatccgggaatgcccgtgtcgatgagtatgcagcctgcttcgctgcggataagatgggcgttgaccataccgaagggtaaaatcggaagggtaatgatctgggtctgaaacatggattatccctggatagacaagcgccgaagatatgctgccgtggtgcgcgttacggcagcctcgatgtcagtcagcggctagaacgataaagtcagcaacgacgagcggatgcgacaacatcggaacatggctggaagcgacacgtttgatcgtggcattcatacgcgtggccatgcgttcctgctctacgggcaagattgccatatcgttgtcaccaattagatagaaagtaggacgactacgccatgcggcctgtgtcaaggtgccgccgagtgcagcgccattgatagggccttgcgttgcgtgcagtattgtctgctcgatgggatcgagatcctgtgcaaacagggtggcgatacctttgggtgttagcgacagaaagccctctgcgtctggcctgatttcgtcgttaagcggagctgcttcaaactgggcgaagagcgatcctgccgactcttccgcgtccggtgcaaatgcgttgatgtaaacaagccgtgttaccttgggatcgttgcccgcttgtccgatcaccgcaccggcatagctgtgtcctaccagaacgacatctccctgcgccatcgcgattgcacggctaactgccgcgacatcggcgtcgaaactggtcagcggaagttggacggcagcgacagtcatacctttgtcgctcagcagcgggatgattttggcccagctggagccatctgcccaggcgccgtgaacgaggatgatgttagttgtgctcataatacttctcctaaggtgtcggccggtattcgaagaagaccttctagtcgacccactcatcatcgcggcaactgaatcttgcggcaatcgccttgctaagctgaaagctgccaagtgtctgtgataaactgccaaagtccgttttagtggcttagtggccggaatttcggatcatttttgacaaaagtaagggtcctgatggcaaagagagaggttgcactggtcattttcgaaggcgttcaggcgttagacgttgccggtccgctagatgtgttcacaacggctaatgacttcttgcccgaagaggaccattaccactgtgtcctggtggcggcaactacacagcgcatacgcagctccaacggaatgtggatggtcgctgatcttaccttcgagcaggccgagcgatcttttgacaccgttctggtggccggtggcccgcaccttccaaccaccctacccgacgctgctatgtcagcgtggctacggacgtggggcgttgcggcccagcgatatggctcgatttgcaccggcgcttttgttctcggccatgccggacttctcaatgagcgtactgttaccacccactggctttgttccgagcagcttgccagtcagttcccctcagcgcgggtcgagcaagatcggatccatgcgcgcgacggtcgtctggtgacctccgctggcgtgacagccggcattgaccttagcctcgctttagttagagaagatcatggaccggccatatcgcttgcctgtgccaaaatactggtcgtggtggcacaacgccagggtggccaatcccagttcagcccgctgctaatcgcagatcgcgcccctgatactccgctgggaaaggtacaaacctatgttatggagcatgtgggcgaagcctttccggttgagcggctggcagatattggaggcgtcagcccacgcagcattgcgcgtctcttcgtcactgaactgggcatcacaccgcatgaattcgtggaaggaatacgcctggatcaggctcgcaacttgcttgaatctacagaactgccccttaagaccatcgcttttgactgtggcttttccggtcctgatcagatgcgtagtgcttttcagcggcggatcagcgtcacgcccctgcaatatcggggaagtttcagacgcgtgtaaatggccattacttggtcatcttttacacaacgcttacaggccagtaatgcttaacctgagtaaggttcgcttctggcgtgaagccgagaaggctggacttccgctgtgagcgaagttcggacattaagtaagagattgacaagcaccctgtgacaatggttgtataatacaaccattgtcacagggtaatcataatgattacagagcgtcagaacataaaaaacatccgtgctgcatcacgtttaatggtgcgagagttaggcttcatgaaccaaagtctggctgcaacagattatcctccctctgccgttcacgcattacttgaagttgaaacgcatgggtcagtaacagccgctcaactggtgcagattttagagcttgagaaatccagcgtcagccgcatggtcgctaagctcgttgaagccggagaacttgaagaaaacacgtccgctgatgacgcgagggcgaagcttttaagcctcactgggaagggcaaaaagacggtacggagtatcaatgcttacgctgagcagcgggtcgcagcagctttggataagcttgatccctttacgcaagagactgtatcacaaagtctttcttcatattccagcgcactgaaatccagtcgggaaaacaccgaagggaaattgcaaatcaacttcaaaatagtgacgggttatcatgcgggtatgattggccgtattactgaaatgcatggaggctattacgccagagagcataattttggccatttttttgaagctaaggttgccgcaggccttgcagatttttcagctcgcctggataagccatgcaatcagatttggctggcaatggtgaatgaacgcgtagtcggctcagttgcaatagacggtgaggacttgggaaataatgaggcacatctgcgctggttcatccttgacgatggttgtcgtggcagcggactgggtagaaaactcattggagaagcgatgagtttttgtgatgagcagagcttctcttcggtgcaattatggacattcaataaactgaccgcggcaagacgattgtacgaatcattcggatttgagttagcgaaagaatgggaaggcgatcaatggggcagtactattactgagcagcagttcactcgcaaatcatcttagaatcgctaacgacttccccttgatgggcagaaagtttttagtacttacattgttcagtctttatgtccctgattagtgatgtccgctcctggcacaaagcggacaagctaactgagctggaggtccgctatgagcgaatagcggaagtttgtaacctctaattttcacttcgtgatcttccttgcatcttcacggaagttataaagtgctttatgcctgcaaaaagcggatgaagcaggccggtgttgattaaccagccttaattgagtgtcttgtaaattacagctgacgggaccgctgaccacgtccaaatgcgccgtaaggatacccacccggaacaggggcactgacctcatttagggcttcagttgccccgccatccagcgtaagctctgccgcgcccagcccatctctcaactgctcaagcgtgcgggcaccaaagatgggagcggttacccccggtctatcagcaagccagctcagagaaacctgtgctggcgtggcattgatctcttttgcaattttcacgacggtgtcgatagtatcccagttacgtgctgaggcggcatactcagccgaaacctgctggtagagagggttgtcagagcctgcccggctgtccgaggacggcttaccctcgcgggtatatttccctgtcaagaatccacctgccagcggtgaccatggcagaagtcccaggccattatgtaatgagctcggaaccatttcccattcacattcgcgagaaagcagactgtactgcagttgaagagtgaccggcagatgaagccccattgctttggctgtagataccatcagctgaacctgccaaccggtgaagttcgaaagccccacatagttaatcttgcctgtacgaactgcgtcatccaggaataacagggtttcttccaccggcgtatgggggtcccatgcgtgaacctgatacagatcgatagtctcaacgccgagacgttcgagagaagcattcagcgcacggttaaggtgacgtcgggacaaaccagcatcattgatgtctttacctgtcgggaaccggcctttactggccagtacaatattccctgcggcacctccctgccgggcttttagccagcggcctacaatttgttctgaaacgctgccaacgtaaacgtctgccgtatcgataaaattaccgcccgcatcgacaaaggcatcaaggatactgaaggcgtccttttctgaagtttctgcaccaaaatacatggtacccagcgccagtgaagacactgccattccggtgttgcctaatttgcgatatttcattaactatgaacctcttggttaaatcgtgtgtttgaaaagcgcagaacggttctgactgcggaggtgtttagttttgaaagtctaaaaggtatttactgataatattagagtgtaaaatcaggattaaattagaagcaggacttataaatggccagtgatgactttaccggtattattgccttcattaccgtcgcacaggagcgcagctttacgcgcgctgcggctaaactgggtgtcagtcagtcagccctgagccagaccgtgcgcacgcttgaatcaagattaggtgttcgcctgctgacgcgtaccacccgcagcgtttcgacaacagatgcgggcacccggctgcttgaaaccgcctccccccggcttgcagaagtacaggctgaaatggcagccattgcggagatgagggataaaccgagcggtacactgcgcatcaccgcgagtgaacatgctgctgatacactgctgtggcccaggcttgctagatttctcaaggaatggccagacatcagagttgaagtctccgtcgattacggcatgacagatattgccgctgaaagctacgatatgggtatccgtcttggtgatgaggtggccagcggtatgattgccgtgcgggttggtcaggaccaccgctttgcggtcatcggttctcctgactatctggcaagtcatactccgccgaaaacgccatgggatcttgagcatcataactgcatcagctttcgtcttcccacctatggcgggctgtatgcgtgggagtttaagaaaggtaagcaagaggttcgcgtacgcgttgatggccagcttatcttaaacagcctctatcaggtcattaatgccgcgctggatggcgtaggattggcttttgtcccaagagattcagtggctcaacacattgcagatggaaggctacaggagctgattgccgaatggtgtcctacttttccgggctattacctttactatccaagcagacgagaaacttcccgagccatgaaactgctggttgaagccctgcgttatcggacatgaccaacaaagatacccgcttgcgcttcacgccctgagacattcgacaagctttttacgacatcaacaagggcgattttcgcgcttcgagtgccagcaaatatttcgcttcgtcgtaacggattttggtcttccagcagcggtaaatgatccctatccatttgaatgccagagcccagatgacgattgatgagattttcctttttctcagaggctctgataatacagtttggttcagtatgaggaatttaccgtcttcttagcccattccaccaatgtttgtcggacgaacttcgcacattgccaacgccagtgaacccatgatttttgaccacttcgttcggttactggcgtaattccagcgtagttttgaatttcttcggcgctcttgaagcggttgcgattatcacacagtgctgcaagcattcgtgggcccatgcccggcagtaatttgaacagttcagcatctggcaatgtgtcaaacagcgtttcaatgcgttcgtcataggttttgatgatttcactcacgactttaatttgtgtcggcagtgctgttgccatcaaagcattagtctctataacactcgggtctgcagtcaatggtagcgatcctgcctttcaccttttggtgcaattcgttgagcccgataacaagcgcttccggagtgtgttcaaccacatggaataagcgctcgccgtttttaaactgaacacagacatcgtgctttttatccacccagtccagaccaacatgggcagcaaactgatctatcgtggtcatggccaactcctttttatcagggatgggtatgcatcccacgttcttcgaaagaaacatagccagcagtttttctgcatgccctgagtattcgttagcaaacgtggggcacttactggctcgaaagtaaagcggcaatcatcaaatcacatgattctggcacaatatttgtaaccagtaagtgcataccctgaatcactcaaaagtgtcactctcagggtgtgaatgactatagatggcaaagaggtgcctgtataagtacaaaggggtgctttgtacgaacagcgcacgttgatactaatccaggtatagatttctgtttaagctggatttattcattaaatgagttttcaattcgaatagagtaataaaattggaattttttaggcatgaattggcattactattaattcgtcaacgctgaccattaataaggatgaaatttatttattatttaccaacattcggaacggcatgcctgatattgacacactcgcacttccattaataaacaccgcggacaataatcttgaaagtaagcatttattttctctgtgtgcagtgaaagcgaaaaatacactgatcaatcatccctgtcttgacgtaatttattgacagtcgctcccccgggctcaccgtggtgaccaatagccttgcgaaagaaacacagggcggctgtcgcatcctgtttagctgtcagtaggaagtcaatggtctggcccttgtgctgtcaacggcccggtacagatatttgcactggcctttgattttgatgtcggtctcttccagtcgccatcgacgcccgtacgggaggtttataccggcgaaacgccttattcagcaagggcacaaggcggataatccaacggtgccgtccgcaacagtcccagacattctaagctgggcgctgttttaattgttcagtaaataattccactgtaattaaagatatttcttaaataaatgaagaatagccttaactacaaaggaaattaaatttagtaatatcttttactgtgtttaaaggagctaaataagggccaatgaaggaaaattatccatttttaacggatgtttctcgtgagcacttaaacaaacacgcttttgccattcaaccttataaattttagtaaaggactgcttatgaaaacatttaagttaaaatctctggctttacttactacgctgtctgtcggtggttttctgcatgcaaacatggcttccgctcatggttatttagaaaatcccccagctcgcggatttttttgtcgagcaggtcaggcaggcgcaggttctccaggctgtaaagccgttggccagttcagtggagccgttaccacaccacaggagattgtcggcggtggtctgaattataaagaaacgctaaaaaaaggcaaaatttgtgctgccgacagccgttacccaaatcttgggttaccggctaaccaatggaaacataaagctattaccgttaaaaatggcaagataaccctcgattatcgtttcaccgcgcaccacggtactgatcatattggctactacatcaccaaaccaggtacaaataatgccgataccattggctgggaagatttgcaggagcttgcccgttttgatggtgttaaagggccaaatggccaaattggtggtttcggtatttattctgaaacggtagatttacctagtaacattactgatggtgattacactatcgtgacgatgtggccggtttccagacagcatggcacaggtgaaaactttacttcttgcagcgatgtgacactcaccgggttaggtcaaggtggtggagaagtcgttgattcctggggagtcattggcgatggcgtaactgcgaccaaaaatctgaaggctggcgacacagttaccttccgtttgttcaaagccggtgcggatgcgggtaaagtaagctatacgctcactgaaaacctgagttcatattattggctgcctgaccttggcgatgcggtaaatgataccaaaaacttcccagtgaaaattggtgacaccttaaaaggtgatgaggtatcgattgaatattcggacgatcattataatgtttatgctaaagggaaaaatacaaattactcctatgttataacccttgaggagcagactcagccaggcactggcgcttctccagttcccgtaatcactgccagcagcaacactattacagattctgaatggcttgagctggatgcgttaaaaaccaccgaccctgatacctccaataatcaattaaagtatacttgggaagtcacacgtaacgccgataaggttgaacttgcaaataccagtggcgcagaaacacgtatacgtctacataaaccggccgatagcgactttaacgtaagcgttaaattgaccgtgaccgatccgcaaaagaataagggtgaagtaaccaaaattctgaaagcagaacaatccagcgagaagcctggcgacgagcaacctggcgacgagcaccctggcggcgagcagcctggtaatcctggcgatgcagctgcttacaacgctaggattgcctacccgacaaaatgcaccaaagtgtctcataatggccaggtatggcaaaaccagtggtacgtgaatgcaggccaggaagagccgggtaaaggcggttcgtggggcgcatggcgaaccgagaaagcaaccagcaaccaatgtaagtaagtggttgtgtcgtattaaggtggcgtcaggtagcatgctgttttttgtgatgttgcctgatgatgcctctgactcgaaacgtcttcaaacgactgcattatcccgtcgatatcattaccctgtgtgttggcgggtacctagcctataccctgagcctgcgcaacctcgacgagagggtggcagaacgtagggttattgttgaccaagtcacgctgcagcgctggattatccgccttgtgcccttactggacaaggcgtttcgccggtataaacgtcccgtacgggcgtcgatggcgaatggaagagaccgacataaaaatcaaagaccaatgcaaatacctctaccgggccgttgacagcacaagggccacaccattgacttcctgcgacagcttaacggatgccacagccgccctgcgtttctttcgcaaggctagtggtcaccacggtgagcccggggatcagtcagtaaaaggagaacgaagctgcgcctcttttagaaaatgaatagcatcctcacccgcggcactgtacagcggggcatttttatcgttagccaccgtcagaatggtattcgctacatcgtcggcgtaagttactggtgattggctgttcgaggaagaataagcgttcaataagcctgatattaaatatcacaacgtaatattgataatggtcagaaagactaacttttgactatttacgccacaacatgtctgcctctcttttttgaaaaaaaacataagactttgtaatttaatgcctttaaattttggcatgcctcttgctcttcatatagagcccagcatgggccaacattcctggttaacaataatgtaaaaggaaacgctatgtttggaaaaatagaagacaaggctaacgaagtcgcaggaaaagctgaagaaaaatacggcgagttcactgatgattatgttcatcaggtaaaaggggctgcacagaaagtcgtctctcagagcagccaggctgcccaagatgcagccaacgtcgttagagatcgcgtagagggcaaccctttcgtcgctatttctatttccgcaggtgtaggtttattactaggcctcctgattgggcgtaaagagatatttatgatatagcactagaatatggatttgactcccagccacattttagtcgggcttttaaaaaacagtttggtgtgacgcccagggctttcagaaagtctgaaacattagatacaaagaaattctttgcgccaataaaatataagaaagaattatccctggaagctgatatcgtgacgctcgaacccatgcaactggtcggtaagagaaaagagatccctagcaaggttggggaaaatgaatacttcgatttcaactccagaatgaagatctgggatgaccactttatcaatttacgtgataagcccacgaaactgattggtttggtggagtatatttcatcaagaagttcaaggcaggaatatgcttttcagtatacggcagccaccgcaccatcggatgcgaataaccctgttaacaatgaagagttaattactattgaaaaaggtaagtatgtgaagtttcactacgatggcgctatggatgggatgcaggattttctttacaatatttattcggtttatcttcctaaaaacaaaatgatacgccgaaaaggagaggatatagaaatctataagccgttaatgtccagcgtcaagaatcacgatattaattgccaatactttatccctatactttgagtgataatataaattaacacctctggatttgactgactggagactttatttaagggagcgcggagtatggctatctctccctgcgtattatcgaactttacaacaaaacttctctggcttatgaaccaatccgccaactgactgtaacttcagaggaacagcagtggcggatggcaaagtatacaacgggaagcgagttttgacccggtatacggttgaaataatgcgtagtgatgtcatcgctactccgatacgctccaactgcacgtgttgtacctcccttatattatattttatgaactcttaagctgggagccagcatgttagatctacaacggctccacaacaggaaatggactcaacatcacataccgaaaacgattacccttataaagctcataaattagttgcaattatatattccgcagcatcaacacccgcgtcgacaggtgcggtcagcgttactagattctcttctactgtatggaccaattcgcctaaggaattggcgccgccagccacggaattcagctcttcatcgttcgctgccaaaataagttctttcatattgcacctctaaaatcattcattcgtatacgcgttcaacgcgcgaagtacccgcccgaggtgttgcttaaatgataatgacaaacaatgtattactcattcacaacactccaatgactgtagtgcaatccactaaatcatgtccatgtccgtgtctttaaacgggtaatgccatatagtaaggttagacgttgattataatcattttacaccagacaaccaaatcatgatttagtcaaataacctatattaattcaaacaataagttatttacactgagaaagagaataaaataagtcagttatcatgaaaacatagccattacatgcataagataactatatgaatttcactgtcttcaagaggagggtttaactccttttcatctacgtgaaatattcacggagaaagctggaaatctgccagtcgagattattctatcgcgcgcttttgtaggcagacgatcacctggccaccttgggcaatttaatggccgaggtcaaaggcagtgctgaaattaatctggcagaaatttgtcagagaagtcgacaatcttcacataactcaatattaggcaacaaatcattaaccttacaaaaccgaaaaccgaacccattgacagcataatatgctacagaaattgaatataaaaaattttgctaccaccttttgacgcaatagcgttaagtaacagtataagtaagcattggcattgcttatatatattaaattgcacaaaaaacatgcgtaactgtttgattttcataagtttaacattaaattaatagtaagttaaagatatattgttattattttgtttttcttaagggaatctaaacttgtttatgaactgaggatgattttcccaaatatttattgaggggttattaccgttagggtgaaaatgcatttatcatccacttcagaggttacaatgaaaattctagaatcctgtgatattgaaatggtgtcaggtggttcaattaatggtttaattacaaaataatatattgccattgagagtttcgtggtaaatccgccagaaaacctacagcaagtcgttagtgatgtggggaaagttacatatatcattcaaaataattaaataatagtttacaaacccacaatcatgaaactaacaatttcatgactgtataacccaatattaaccttgaagatagagccacatcatgccgtcactgttccgccgggaagttagcgaacatcagcaagctcaatggctgggtaaggcattattaattaagggctggccgctgtggctaactttattatcaacgatggcgtttattattatcctattgtgctttctaatcttcgctaattatacaagacgcattagtgtgaatgccgaaatcatcacccagccacatactattaatctcttttctcccgaacaaggcgttatttcaaagctgtttgttgaaaatgggcaaagagtgactgccggtatgccgctttatcaaatcgacctcagccgtattactcagcagggcaatgccagcacctcaacgctggcggctatttataaacagcgccagcagcttaacgatattattacccagcagcaaaacaacaaacgcgaaacgctcagtaatctgcagcaacagttagaacagtatcaacaggcgcagattggccttaatcaaatggttgcctcgtctaaagatgggctgaacgccatgggaaaaagtctggactcatacaacacctcgctgcgcaaagggctgataaccaccgatcagctgaataatcagcgctatctctattaccagcagcagagtgcctatcagaaccttaccgcgcagattatccaacaatctctgcaaatcagcggcctgcaaagcgccaaggtcactaaagccgcagaatttgataatcaaatttcgcagtcgctctatcagcagcaaggcctggatcgcgagttggcaggggctgatgtcaaaaatatgctgctgataacggccccttcaccaggcattatttcgtcacttagcgtcacgccgggtcagatggtcaattccgggacagcctggtgcagctgataccgggcagtcaccccgtattttacctggtggcctggctacccgacgagagtcgcccgttcgtgacccttggagaaagcttgaatgtaagctatgccgcatttcccgccgaaaagtatggccagtttccagcaaaaattttctcattagccgacgcccccagcaccgcacaagagatgaaggactatctcagcgccccaagaggcagcaacggcgcgataaccggcagctattttaaggcaattattgcgctggatccggccgcactgagctggcacggccaacccttggtgattgccagcggcatgcaggcgcagctatcgctgtttctcgaaaaacgtccgctttatcagtggatgctttcaccctattacagcctgaaaaatagcattacggggccggtttccggcgggaacagtcaatgaataaacaacagttgaatgagttagttcagaagttacattttggttttggccgtaaagtgccgcaaattattcagaccgaagccgctgaatgcggtttggcctgcgttgcaatggtctgcggatttcatcggttgcagaccgacctgctgaccctgcgtcagcagtttgatgtatcaacccgcggcgtaacgctgaaaacactgatgtcgataaccagccagctgcatctaaaatcacgcgcgctacagctcgacatcgatgaactcggtgcactgaaaacaccctgcattttacactgggacatgaatcactttgtggtgttgattgccgtgcatcgtgggcgagttatcgtgcatgatccggcttttggaagacgtgtactgggcatacatgaggtgtcaacgcactttaccggcgtggccctcgaactttggcctgatgcagaattcgtgcagaaaaaaagtcttaaccaacttaatctacgacgcatgatgtccaacatcgacggccttgggtccacgctgctgaaattgttctgtttctcgctaatgatcgaatcggttaacctgttgctgccggtgggtatgcaactggtgatggaccacgtcattcccgcgcaggacgttaatctgctgaccctgatctgcctcggactgcttttttttgtactgtttcgcaccggcgtcagcatgctcaagtcctggagccagctggtgatgagcacactcatcgacgtgcagtggaaaacgaggctatttgatcacttgctggcgctaccgctatcctattttgagaagcgtaaactcggagatattcaatcacgtttcatctccctcgacactctgcgtacaacgctaaccaccaatatcgttaacagcctgatggacggcattatgtcgcttgggttaattattatgatggcgctgtatggcggctggctggtgtgggtaattttaggctttactaccctttatactctgtttcgcatggtcacctatccgcgctaccggcaaatttcagaggagcagctggtgaaaacggctcgggccagctcgcactttatggagtcgctttacggcatgggcacgttgaaagcgctaggtctctcgccaaatcgcgcccagcgatggcttaatatgaatatcgatatcgccaacgctaacgtgcgcaaaacgcgtttcgatatgttgtacagcggcggcaatgcgctgattgccactctcgaccagattgtacttttgtggctgggcgcttcacaggtgatcgacggccacatgacgctgggcatgtttgtggcgtttaacacttaccgaggccagttctctgagcgcgcggctaatttgctcaatatggcactgcaactgcggatgctgtcgttgcactctgagcgtatcgccgacattgcgcttaacgacgttgagtactgcatgccagaacgcccgctgctgcatacctctgaacccgccgcgctggaggttcaaaatgtgtcgtttcaatatgacgcgctttcagccccattgattaaaaatcttaaccttgttattgccgctggagaaagtgtagcgataaccggtccatccggtaagggaaaaactacgctgatgaagctgctctgcgggttgctgcagcccacctcgggcgaagtacgcttaaacggtatggacatcagcaaggtgggcgttaacaattatcgcgcctgtattgcctgcgtgttgcaggatgatacgctgtttgccgggtccatcgccgagaatatcgcaggatttgaagaacagcgcgagccagagcatattattgactgcgctcaacgttgtaatattcaccaggatattctgatgatgcccatgggctatgaaaccctgataagcgagctgggcggaagtttatcaggtgggcagaaacagcgcttattaattgcgcgggcgctttaccgccgcccaagcattctatttttagatgaggcaaccagccatttggacatcgaaaatgaggcgcgcatcaatgcctctattgccgctcttaatataacccgcattattattgctcaccgcccttccacggtagcctcagccgatcgcatttttgtgttagagggataatttcatcactatttcacaggctatatcgccaacaattaataccgttgtgcagtgaaatacctgcatgggcattttaaggctctggggttgagttttgcaatataatgatcaacgcaaatgggtcgagtaaattacagatttgatcggctggattcatcattaaccagcccgccaactgactgtagaggaataacattggcgggtggcaaaatatccaatgggtagcgggttttgacccagcttagggttggaataatatgtagcgatataaccactactccgatgtgatgcaactgtacgtactgtacttcccttctattagattgcagtaatactcacagcggaagcagccaactagataacactcagcacaaagtttgcctctttaaatgtatcattaagcacaggttgggcaacacccacattaaacgctccataaccctgctctatatcattctctaataaatttacatcaccaattaaactgccaccagccacagaatccagctctttatcattcactaacaaaataagttctttcatgttgcaatcctcgaaactcattatttcagatgcgcgattaaggcgcgacgtaaccgtctaggctgttgcttaaataacgcttgcaagcgaggcgtcatttactttcaactctaaaattgtagttcatttaacttaacaattatttttttaatcttaaattacgaatgcagtaggattatctatgcactgacgccaggcgttgataaatataccctttatcagaaaattgttcttttggtgtggggaatgttttttatatttgtaataattaagttttataccaaaaaatttaattattacagacaattcaacgcgtcgatagaagaatttatagtgataaatcttgtcgatttctcactaaataattcaacctatttttgttaccgagtcactgatagattaattgaccggctttgagcgaaaagcggagctggcttattaaaatcaatgtctacgcttccactcatttacaacatcacccaaagtttttggctcatcattacgtatccacatcataaacttccgttcgaatcgaaaatattctccacaatgttcaatcatgaaacgacgaacgtttggggtattttttagtatttttcaacgatagtggtacgggttagtaatgagctatgccaatcaattttcaacttactgactcctgtgattaagaggttgattagaaattaggacactaaccgtgcatattaaagccagacatttgaaaatcttcatatacttcttcattggtaaagggtgggaatttggctttctgggctgctgattttaccgcttcgcaatatgcttcatttccgtcacgggtagaaatgttggaagccgtgccatccttagcaaattctatatgtaacctgcatttcttgcccttccagctttgtggatcgacaactttggcatttactgccgccacaattgcacgcgcctgggcgccccattcatcctgatcttcaaagtcaccagaaccgcaaatacccaatgccgaggttttatggcagccggtaggatgcaacgccgtgcaccccgttgccagggtaaccacaactgccagcataaagatttttcttgccatttcaaacgctcctaatccattagaataccagaatatatcatgatagatacaggtattctaatggcaaacaacggctaacgcggtttagggcgactgtgagaaaaatgcggacccaacgttgttgtgggttaatcgctgtgaagcaggtcggtgcatgaagcgcactgctcagataattcaatgtcaattatcaaatggagttgagtctttataatcgtgtcacataactatccgttataaggaaataggtgatgattaaacccgacgagtcggtcaatataaataacgagagtgaatctcgacgtatgagaacgagccgcgtatgcggtttgcatcatattgccactaatgtaaagcgtattaccttgtgtggtgacgatgttgactctttcttattgaattcgcgcacgcagcttcccgctgcctggataaaagttcttttccctgatggtctgaattatgcggctcgtgcctatacgctcagcggcctggataaattcgcaggcacaatcgactttgatatggttttacacggcagcggaccggccgtaaggtgggctaaaaatgcgcaaataggcgatgttgtgggatttgccggacctggcccaggggggttcgctctgaatcctaaaagcaaatggctgctgctgatcgtcgatgaagccggaataccggcaatgaagtctatcctgacgagtttgccttcaaacttgccagtcatattgtttgtcggtgtcgaaagttcggtcggaattacccaactgacacattcaaatttgattgctcagtattcggctattagttcactaaagggtgaaagtgctatgcgtatgcttgttcaacaggccatcgatgaacaagtacttccagccagtgaagggcaggcatggatagctacagaagcggatgatgctcgttatttaaagcaacggctaatagaggcggaaatatttaaacccacggctattttttccagaggatattggaaaaaaggcgttaaaggctttaatgataccccataggctattattcaagggataacagcgacgttgctcacagcaatattgactgcaaagaaaaatagttttcgatatttatctttgcagttatcgctctctacgcttgaggactgctttcattttcctgattttcaaccagcacgggacagtccgccaggtcgataacttctttggcaatcgagtgctctacccagcgtttaagagaggataaatgccggtgtcccatcacaatgagatccacatttaaccgactcgcttctttaataatcacctccgtcggttctccgccgataatcgccccgctgacttgtcgattttctgtcttgagcttggctattgcctgattcaccattttttgagcttgctggtactcttgatttgcaggcggataaaccagcccgtcgccggcctcgtcatttatgtttttatcaacgattaaaaacgccccgtctaccacgcataaaatatcgattttaatcagcttctctgcactgattttatgggctaatgcaatgacagcctgagactggggagagccgtcaagcgccacaagaatatgggtgaacattacgtttcctactagtgaaagataaagatttcattttctattacctttctcggtaaataaatgccttcacacgcagctattaagtgcatcaggcgcactgctggctccaaagcagcacttatcatcaagcttccgcgaccacaaaatcctgtttcgccatttttctcccgcttaacaacttgctgggtactcatacttatcggtctctattgcagcaaacgagcttaagcacagccctaacagcgtgtgattaatcctcagtgggtttgatgaatatctctacgtgacgttaataatgccagagcagctgcaataactaataaaatggcgctgagggtgaaagtgccttgatagccgatatggtcgaaggttaatcccctagggtggagcccagggcgattgacagttgcacgatggcaaccatcagaccgccccccgcttctgcatcttcaggcaccgttttagcgatccaagtccaccaacctgtaggagcagcagtggcgatcaacccccataaggcgagtagcggtgcaactatccaaagactgtggccaaaggcgataagcgctccggctattgcagccataagaaaggggatgacaatcagcgtggggtaaaaggcagatttcaaaaatacaccgatcgccagggttcccacgaagccagcgacgccgagagtcagcaaaatgagcgacagcgtagtgatatccacctgcgttaccgtctcaaggaacgggcgcaaataggtaaacaacgaaaactgccccataaagaacaatccgcaggccgtaaggccaacggccaccagcggattagaaaaaagacggaaaacagtgccggtaggtttatcatttttatccgttctcatgggcggcaggctcagccactgccagataaaggccattaccgcgaccggaacgaggcaaaagaatgccctcgccagccgatgacagaacccaggtaactgccaagcggtgccgctatcacggtggccaacgcattacccccgttaaaaatagccagtgcacgaggaactcgctgcggtggaaccaggcgaatggccgtggcggcagacagcgaccagaacccaccaatcgcaataccaattaaagcccggccagccatgtaaataagataactgggtgctaacgcgataacggcaccggaaaaggccatcagcaccgtcatccccaacagcagtatttttcgattgagcgcgccagctaatgttgaaatggagagactggtcattaccgcaaacaggccagaaatcgcaatcccctgcccaaccagtccctcactgacgcctaattctttagagataggcgtcagtaagctgacaggcataaattctgaagcaacgagcgcaaagacgcacagcgtcatggcgaatacgccgccccagtaagcccgctctctgagaagtggtgtgtgattcgccaaactgggcatagatttctgactccgaataataccccgctgtttttaggcaagccgaggccgaacgctattcacaggaatagcgtcaaaaaatggatgaaagatgcaaacagcaaccgcgtttataggccagagcctaataaactgttgtcaggaattttacccgtcggctgcattattactagctaatgaatacttaataggtttataaccaatgcttattaatgtagtggaacctgcctgatgaaacgtaacctcaatgacctgctctattttgtcacggtcgctcgtgaaagcagttttacccgtgccgctgcaaagttaggggtcactcaaccggctctcagccaggcgatttccgcacttgaagaacggatgcaaattcgcctgctaacgcgtactacgcgaagcgtatcgccgacatcagcaggagaaagattgttgctggctataggtgatcgtattgatgaaattgaagccgaactggatatgctgaccgaactgcgcgataagcccgcagggacggtgcgcatcacctgcgggccagacgttttgcacactatcctgttgccaaagctggccccgttgctgcgagagtacccggatataaatatcgagttcgacgcgaaccatggtttccgtgacatcgttgcagaccgttttgatgcgggcgttcgactgggtgacactatcgataaggacatgatagcgatacccattggtcccaagctgcgtatggctgcggtcgcctctccagactattttttacgctatcctgttcccaaaaccccttatgaattgacgcagcagccttgtataaaccagcgtttgattagctctggcgggttgtatgcctgggattttgaacgggatgaagggagttttaacgtgcgcgtcaacggacagctcattttcaacacctcctcccacgtgatagatgcggcgcttgccggactcggcattgcttttttacccgaagaggagtttggaaccctgattgaagagggtcgtctggtccgcgtgcttgaaccctggtgcaggccatttcctggttactacctttattatccaagccgtaaacagcagtctcccgcattctcattggtggtggatgcactgcgattatgaagcggaccaggtgtgggagacgcctgagcatggcgattgattacgacctgtgtaacaatttgaagcaacattcacttttatatggcaaataaatgaaaccgtttgatgaccttgtaaaagaagcccaagaggctgacgtagagggttgggggtttggctggctggcaggaagagcgacggaagaaagaccactgtggggatacgctaagttactgggtcaacgcctgagcagcgtaaactctgccttagacctcgataccggtggcggtgaggtgctaaacgaggctccagtattcccctcaaaaatgtttgccacggaagcgtggccgccaaatataaagaaggcccgtgagcttttgtccgcgcgtggcgtgcaaatcatcgactcagcgggcatcaacacacttccttttgctgatgcttcctttgagttaataacctctcgccaccccgtcgcgccgaactggtcggaaattcaccgtgttcttcagccaggaggccgctattttgcgcaacatgtgggcgcagcctctgcctttgaactcattgagtactttttaggccctttaccctacgagagaacgctgcgtaatcctgaaaaagaggctaaagaggcagaggcggcaggattagaaattatggatttgcgcttagcgcagtgtcgaatggaatttttcgatattggcgcaataatctggatactgagaaaatgtgtatggtgggttcccgatttttcagtagaaaaatatcgtcaaaaattattaaagatggatcaacagatgcgtgacggtactccttttattgcacattctacccggcacttaatcgaagcacgccgataaacccaaaatcccgcttttagagtacggtcgccctttataggcggccggttcgcgtaataaaattcgtcctaatgactctttgaggatctgcctgttgttctccaaaagatccataattacccctatttctaaataattaatccactaataagtacccccggcaattaagcggaattattggcgtatccctcccttcggaaaaagaatatttacccccaggaatccctgttatttgccccacagtctgggtgcaagaaaattcctaattgtaatcaataatcattctcattatagtttagtttcttatttacgtttttttagcacagggcaggtgtttcatatcatgaggaaagatacctataaatattcgttgttgagttcgctcatcgcgggaagtctggtcgtacctttggcgcaagcggacggagtcaaagccgaagagaaaaacaatcatgaagatacgatagtggttaccgcccgagagcaaacgctgcaagcgccgggcgtgtcaatcatcgacagcgaagcgataaaaaagcaccctatccagcgcgacgtttcagaaatcattcgtaccatgccgggagtgaatctcaccggcaactccagcagtggtcaacgcggtaacaaccgtcagatagatattcgcggtatgggccggagaataccttaattctggtggacggtatgccggtgagcagcaaaaactcggtgcgctatggctggcgcggcgaccgtgatacccgtggcgacagtaactgggtgccgcctgaaatgatcgaccgcatcgaggtcattcgcggtccggcagccgcgctgtacggcaatggtgcgatgggcggcgtggtgaatatcatcaccaaacaggcgcaacctgcgtggcacggcaacttcaatacctattacaacgtgccggaacacaaagaggaaggcgccaccaaacgctataacgccagtctgagcggtgcgctggcagaccatctgagcctgcgcctctacggcaactggagcaagactcaggccgatgggcaaaacatcaacgccgggcacgccgcagaacgtaccggtaaatatgcgggccaggttccggccggtcgcgaaggggtcattaacaagaatatcaatggcgtattacgctgggatttcgccccgatgcaggcgctggaactgtctgccgggttcagtcgtcagggaaatttgtacgccggggacacgcagaacaccaacagcagtgcgctggtaagagccaactatggtaaagaaaccaacattatctatcgccagtcgctgtcgctgaaatacaccggggcctgggacaacggcatcaccaccaataactacatccagtttgaaaaaacgcgtaatactcgtctgaatgaaggcctgtcaggcggccttgaggggctctttagcaccactaatccgggcttctcgaccatcacgttgaacgataccaatctgcattcggaggtaaatctcccgttcgaccttgcggtcccccagaccctgaccttcggcgcggaaatgaaccatcagaccatggccgacccaacctctaatacggtgaccaccacctccacggtaaacggtgtctcaagtaccggtcgcagcaactacagctcggcggatatctacggcatttacaccgaggacaatatcgacctgaccgactcgacccgtttgactccgggaatacgttttaaccaccagacttacaccggcagcaacgtcagcccttcactgaatctttcgcaggagctgggtgataatttcaccctgaagatggggattgcccgcgcatggaaagcgccaaacctctatcagaccaaccctaactacctgctatacagcagcggcaacggctgttatgccagttctgtaagctgctatttgcagggcaacaaggatttgaaagccgagaccagcgtcaataaagagataggcattgagtaccaccacgacggcgttcaggcgggtctgacctggtaccgtaacgactatcacaacaagattgaagcgggctactcaccggaatacggcaacggaacgtctgacgtctacaagtgggaaaacgtgcctaaatctatcgtgcaggggctagagggaacgtttaacttcccctcagcgaaaccgtcaccatgaacaacaacttcacttacatcattgacaataagaacgataccaccggcgattacctgacgattatcccgaaatttacccttaactcgaccctcgactggcaggccaccagcgatctggcgctggaaggaacaatgacatggtatggcagacaaaaaccgcagaaatataactctcagggcggcgacactaccggcacggaaacctggcaggtggccccttacgccgtatttggcatgagcgcgctttacagcatcaacaaggacatcgacgtcaccgctgggatagacaatattctggatgagcgccacttccgcgagggcaacgccctgacttccggcacctccccgacctacgcctatggcgcaggggcgcgaacctacaatgagtcgggccgcaccttctatatggagctgggcatgcacttctaatacctcgtcagtccccaaaggcccgccttgccaacagcaaggcgggctttcctgattttcccttcaggcaaacccgtcactgccttattgttattaaggtcgcacagaatctacacctcgttatcgcggtgaatatattgagaaattataaatgagcaatctgttatccagcaggaaatatccacgtatcgcaccgcttctcatcgcattctttttgaccctcttctataccgtcaacggctacgctcgacccgacatgacgcctctggggccgaatatcgccgacaaagggtcagcttattatcatttttcagtcagcaccttcgattctgccgacggcagaagacattacaaggtgtggaccggcgtacccgataaaagcgcgccgccttccggttatccggtgctttatctgctcgacggtaatgcggcgatggacaaactttcggagcctgttcttaaacagctttcagcgggcacgccaccgataatcgtggccgtcggctatcagactcccctgccttttgaggtgaatgccagagcctatgattacacgccgccggtgcgagagagccatcatcaggacctgcacggccgtgagaatggcggcgcacaagtctttcgtcacttgctggaaaaaaccattgtaccgggcgttgaaaaaggtctgaaaatagacccggctaaaagaggtctctggggcattcctacggtggggtgtttgttctcgatacttacctgtcttcctcgtcactgttcagccgctattattccaccagcccgtctttgaaccgggattatgccgtcctggtcgacaggctcggggagattaagaaagcggatttctgtaataagtcgctgtctctgtatgaagggacgacacgccgggcaaaaatatcaaatctgaaaccgcaccggaagttctgctcaagcttcgcaacacgctagcagcgctgcataaccaaggcctgccggtgtcctactggtcagatccctgctcagccacggtcagatgtttaacgcctctctgccgcgtgcgctgttaaatatcgcagcggagcaacagagcaacctcaagtcgacctggccgtaatcatcgttaacccgacattgccatgccggcaatgtcgggtatcaagattccgtcgtcgttacgacatcacctctgcttcattatcaacatcgacttcttcagaatccatcaccagggaaggctcactccctgcgctatcacgccacagtcgcgcatacagtccacctttcgccaacagcgcctcgtgcgtaccgtattcggcaacacgccccgtttccatcacggctatcgcatcgcagcgacgggctgtggtgagtcggtgcgccaccaccagcgccgttcggccctcggtatgcgccccctcggcgagtgaggtcatgagtgtctcctctgaggcgttgtccagacgcgccgtcgcctcgtcgagcagcagaacgtgcgcgttggcaagctgtgctcgcgccagagcaacgagctgacgctgtcctgccgagagagcggcccaccgttgttgaccggtgtgcggaaccctcgcggcaagcttcgcaccgtgtcgaaaagcccggcctgccttgccgcgcgctcaacctctgcgtcgctgcttgatggccgcggatagcggatattttccgcgatatcgccactaaacaacgcaacatcctgctcgaccaacccaacctgagcacgataatcagccagcaggttttcttctatggtacgtccccgatgcgaatcttgccgtcggtcggtgtgtaaagcccggctatcagcttaaccagcgtagacttccctgccccactgcgtcccacaacggcaaccagcgcgccttgcggtatcgacaggctaagcttatccagcgcgggttcacggctgccggggtaaaggaaggtcacgtcttccagcgtcagtgctccttttaaaggaacgatggcagacgggtcagagggtcgcacctcttcagccccttccgtcgccagcagagcgtcaatctgtctggcgctcgccgaagcctgttggtaagaatcgacaatgcccgacagctgctgtaccggcccataaaattgccccagcaacaggaagaaggccgccatcacaccggccgtcatctccccttcggcaacgcgcgatgccccgaccagcagcacggccgcgtaagccgcttcggtacaaaaggtcaggaacgggaagtagacggcaaggtatttttgcgcacgcacgcgggtggcacggaaacggtcagacagcgaacgtaaacgtgccgcctctgcccctgttgcccgtgagactgcactacgcgcagtcccgagactttctcctgtaggctgctgttgactttaccaatctcgacacgcgcctgtgcataggccggtgagctcaaacggcgatagaccagcgtcgccaagataaccaccggaacggcgctcagagccacacaggccagaaccggatcgagccagaacatggcaatcgcaatcgccagcatggtgatcaaactggttgccgcaccggcgaggccgttttgcaggaatcgcgccaacgcatcaacgtcgacggtcatgcgggtcagtcgggtatcggcgtgctgctcgtggtaaggcatgcccagacgcaacaagtgcccaaagctgcgcagacgaaccgtatgctgtacggtctccgccgcgcgcgacgaaaccacggtttgcaatgagtagcagcacccgctgacggcgactaacgccaaggcaaacgcggcacaggtgccgataatggtcagattgcctgccgcgacgcccatgtcgatgccccgttgtagcagcaccagtacgcctacgctcgccgccgagtccacggcggtcagcaacgctgcgacaatgaacatccaggagacgggagataacagtgaggcaacgcgtcggccctgaccgtcctgcgccatctgtaccgcccgttctggcacgcgactcatgcgctcgcggaacccttccccggccccggcagccgcgaggatgttgtcctcatcaaccgacgaagaatcaggctccggccacagctgtgcatgagaagagagcggcttctcgaggaaatcacctgcgccggacatcagggcgcggaatgccggacaacgcgcctctagttcagcctgggtgccgacatcggcaacgcgcccttcatccagcaccacaatcttactggctaactgcaaggtcgaacgtcgacgtgcgatgaccagcagcatgtgatcctcatcggcatagcgtccgagggcggcgttaatctcggactcggtaccggcgtccaccgccgaggtggtgtcatccagaattaacagaccaggtgcggtcagcagtgcacgggcgagcccgatgcgctggcgttgtccacctgagaggttggaagcacgctcagcgagacgggttttgaaacccttgggcaacgcggaaataaagcccgttgcaccggcggcatcggccgcacgacgaatgttctcctccgtcgcctcagggtgaccataggcaatattttcagacacggttccggcaaacaggaaggtatcttcgaataccacgcctacggcacggcgaagctcctcgagtcgaagactggcaatgttctgctttccctgagaagtattgagccacagcgttccacaggtcggatcatagaagcgtgcgagcagcatcgacaaggtcgacttgcccgaacccgacgccccgacgaccgcaaccgtctctcccgtctcgatagaaaatgacacgttgctgagcacgttagcgcctttgccgtagctgaatccgacatcatccagcgtcaacccgacgaccttaccttctacagcctgcgtaccgtcctgcatctgcgattcggtgtcaatcagagcgaaaacacgctctgcagaggcctgggtgcgctgtccgataaccaggaacgaggccagcacgcgagttgggccggtgagcatagcgaggaagctggcaaaggccacgaaggtgccgaggtcgatgcgtccagccatcaccgaccagccgccaacgcacagcagcactatctgtcccagcaccggcagcgccagcatggtcgcccccggtatcgcctgagcaatggccgcaccaatgcgcacgcgcaccatgtgccgcgactgtttgtcaagccatcgcatctcacgcagctccgctacgcaggatttcacgatagagatttgcgccaggacttcacgcatgtgctctgtcaggttggcgagtttgtccgacgccatgcccgtctgggcaaacacgcgtcgacgaacacgcagcgcggtagtggccagaccggccagcacgagcaccacgataagcgtcatcgacggtgacatccagagcatcaccgcgagacccgcgacgtaataggtcagcacggccagcggaaccgggcacatctgtaacagcatatgcacctgctgcaggtcgctgttggttcgtgaaatcacctgcccggtgcgcagcgcgtcctgccctgcaccatcgagtttctggatgctgtcgaacaccctgccccgcagcgtatgctggacccacagagagagctccccgcgtagccacggcgcacgtagttgccgacaaaatcaaacagcgcgatgaagagcagtcctcccgcgagccacggcaactgcgccgagttgcccgccagggcgtcgttcaccgcctgtcgggttagcaagggcgctaacgcggccagaagaatcgtgctgacagacgccagcacgacgatgatactgagtttcttgcgttcccagcacacactagcaagtcggactgtccatgagctcgcgggtgttgaagaatgagtagtgggcatcaaccctcctgtaatctgcaataaaaaaacccatgacctgagtcatgggatggctgcaatcagccggctttcagttgtgcaacaagacgttcagccacctctgacggcgtggcctgcgccgccatttctgcggcgacctgtgctgatgcactgcgaagcctggtatcactgaggaaggtgttaatgaggtcactgctcaagccgttctcgccggggataatcccgcagcctcggtccacgacggttttggcattcacgggacggtctgccccttcgccaaatacgatctgcgggatcccggcgtgcagggccgtcaacgtatttcccgcgccgccgtgatggataaatccatcggcgccgttgaggaatacgcccatcgggatccagtcaacaaggcgtacgttgggcggcagttctcgcaaatcggcgcgcgcatttgccgacaggtgcagaatgatttcagcgtcgacctcgtgggccgagtccataacccatgaaatcaagtccaggccatcgaccatcggtttgacggtgccgagactcaccaacagacgtttgcggcccggcgtcctgtcccaccatttctcccacactgccccccgttgtagggcacatactgcatggagataacgggctcaccgtcattctggagaatgctcatactgggtggcgtcacgtctatccacgccaggtcacgcggcggtgcctcaacgccgtgacgggcgtaggcatcggaaagcgaacgcgttacgcctttgatatgccagggagtgtgagcgaaaccgacgctttgcataactacggggatattatatttggcgccaatcaaaggcccgacgacgccaagcggcggatagataattaagtcgggtttccactggcccgcgaattcaatcagccgatcggccatttcttcactaaagaaagaaaagtttcccattttggtgccggcgttgctctgcttgcgcaggtcttcacgacgccgataatcggcctcagaatcgaatccgggcgcggcatcgaacgccaccagacccgcctcggccgccttctgggcaaatttccccgaacttgcgataagaacttcatgtccattaacgcgaaaaccctgagccagcgaaagtactggatataacaaaccgtataaaggtggaccaacaaaaagaatacgcatgagaaaatccctctcctgcctggcgtactaaaataggaaatatcacgcagtctcacccctgtggaggctgccgtattttcccgccaggctactattcagcaaatagacgctgagtccccgttgaattttaatagagccattcttcggcgactcaaacgccgtgaacaacgtaagctatttctttttaccgtgcgaaaaccctgttgaataatgtttagttattcccgtctactaataaagtagtaatgtatttaaatcctaaggcaaagattatcgtttcagcgcgcagcatagaaggccgcaacagatgtagctacgtcatagaatagcccagcatcactgcctcggcgcttattgatggggcaatagcacagaggcatcgcaggtataagctatttaattagagcccttggctttggactctgcttataacgctagcataggattacaccttatgtaaaacgtatattaatatttattatttaatgttttcttcattagccttttattaccgcagggtatttaaattcattaaccacttactcaatcggggtaaaggataccattacccctttattcatactgggtaataaagcggtttatcctttattttaatccgtctattaaggctcaaaggtatattattacattttgtcgtgacatccacctcagaacgttatctaataacgcaacggacagtttttattaacggtataaataaccttaactatttcatggatgattaaaatgagtaatatcccgcttttttcgcctcatgataccgctgcggcagcacggctcatcaaacagctggtaacacagacatcgctggatattacgcaattttggcatgacgtggagtcagtcggcgtcccgctggtcaccgaagtgtcgggtaagcgagatgaacgcgaagtcacctttttatggcgttcatctaaatcgctgctgggcgtttatgttttcctgaaccgggtaaccgacaaaataaatgttcccatggggctgatgacgcacatcccttctagtgatatctggaccttaacgctgcgattaccggcgacctaccgcggcacatacaccttcactgaaatcccgctggggacctcacccgaggttgtcgccaggcttggcggacgctttacgccgtttgtgggccaacccgatccgcttaataaggcctgcgggattaacgtgcgcggcgtcgcagaggaatcaatccttgctctggataaagctcccgaacagcccgaatgggcgggtgcaccgctcactcctcgcggcctgctagtgacttcctatcctgccgttgccggtcataagcgccgcgttcgcctctatgtccccgacgttgcaggaacagagccgctgggactgctggtgttgctcgatgcagaaaaatggtttgatcacgtcggcgtactcggggcgattgacgttgccatcaacaacggccgcatcgggccgatggccgtgctcggcatcgataacctcgatgagtccgatcgcaccgcaatcctcggcggccagagcgagctggtgctcgacattgccgaacgcctggtgccgcagataatggccgattatcccgacagagtctgggccggtcgttcaaaaacggtactttgtggccagagtctgggcggcgtcaccgcgcttatggccgcgacccacgcacctgacattttcggtactgtcctcagccactcaccttccatgtggtggatgccgcagagaagcaagcgtgacctcagttttagtgagaatgatgcatcatgggtgagtgaacatctgctgtccgcgccgccaaaaggggtgcacgttcgactctgtgtcggatcgttagagggttccaccgttcctcatctcgagcaactgcaccagcgcttacgggcagcaggcattgacagccatctttcggtctataccggcggccatgattttgcatggtggcgcggggcgctcatcgacggattgtctgcattataatttctttaaagagtcagagcgcgcggtttgccagcgatccaggcatcaacttcgcgctatgcaggtcgcttatcagggatagcgaggtgatttttcaaacatatttgatcaggttatcaatggtttgactagcaaatcagcagataaaacgcttttttaactaaccctttgacttggctgccgggagtcactattattcgcctcgttcaaacgattcctctgtagttcagtcggtagaacggcggactgttaatccgtatgtcactggttcaagtccagtcagaggagccatatttagagaagcccgcttaaggaaacttaagcgggctttttgctttcatcttctcctcccacctcatccccctttttctcgacgagctggaatatcctctttcaaaaccagccctggaaggattaagcgctgcagcggataaaggccatcctattgacgaagagtggattaaagcccgctgtgacagtccgttctgaacggtgaaagtgtgattaccacatcaaatcatcgggcactttaaagtcggcgtagggatcttcttcatcctgctcttcctgactcagcgcactgtttaatacaatactgttagcatctcgctgtgcaattttgtcggctacaatcgcggggataatcgcgtattgactctcgccactgttatcaacaaccaaacgagcaatcgcgagacgaccactgatcagctgcgcctgagttagcttatccacggctatttttttaattaaattattgtctgtgaagttaaaatcaataacgccttttgcgatatcgattttgttcatttcaatgagctgcttcacctgagctttatattctctggttaatgcagcctgtttttgttgttcactcaactctttatcacgctcaagctgggcttttttattttcttccacggcctctcttgcctcacgcgcctgggcccgtgattttttagccgttctttggactttggccatttttgtagtggtcactaatccagctttcagcatctgctcttgtaaagtgagttttgtcatttttgtttctaaaccagttgaataatgcggggattatacctgtaatttttgcagctgttccagtttgcgtcaaaccagggcggttgcggagcagtctcctctcgcgaattattatcatttaataatgaaaaattaaaaaatttatgcgtaatttagtgcgaaagtcagaatagccctatttcgagaagcccgcttaaggaaacctaagcgggcttgttgcttttaggaaaaacttacttcccaagactcaccccgccctgcgtttcttcgaggttaacagggcgcatgataatcagcaggatgacggcaagaaatgcggcaaacatgatgatgcagcccatcagcatcattcctgcggtaaaagaatgggtcatttctttggcgacgcccattaaaaagggaccgacgaatccgccgaacgccccagcgcattgattaacgctataccgcccgccgccgcctgaccgcgcaaaaatttgccgggcaaggtgaagaaaatcgttttggccgagagggttccgaccagcgcaaaggtgacgccaatcagcgcgggcaccaggctgtcaagatacagcgacagcatcagtgccagtgcggcaagcagcagtgccgctatcagatgcataacgccacgccccgatttgtcgactgcccgcgcccagaaaatcagtcccaacgtcgaaaagaaataggggattgccgcgatccagccgatggtggttgtttcaatgccttcggccttgagcatctgcggtaaccagatgcctaccccgtaggtgcccaaggtgtaactgaaggtaatgccgctgagcaaccacacgcggacgtctttcaagaccgaacggaaatgttggctttgcgacggcccttccccccctatttgcatcatccgggagaaggtgactttttctttttctgtcagccagttagcctgctctggcctgtcagctaaccgcctcagtgccacaaagccaagcaggcaggcaggtacgccttcgatgagaaacatccactgccagccgtccatgccgagaaagccgtgcagctgcaacagactggttgagagcggtccgccaaccaggaaagaaataggcgtcgcgacggtaaaccaggcgagaaccctcgtacggaactgcacgggaaaccagatactgaggaaataaatcacgccgggaaagaatcctgcctccgcgatacccagcagcaggcgaatgctataaaaactccatgggccgacgacaaagaccatcattgcggcgacacatccccaagttatcatgatgcgtgacagccagaggcgagccccgaaacgatacatggcaaggttgctcggaacctcacacaggcaatagccaaaaaacatgatccccgcgccgagaccaaactgtgcgggacccagcccaagctgagcactcatttgcagcgcggcataaccgacgctggtgcgatcgagataattaaaaaagtaggcaacgcccaataaagggatcaatcgccaggcggctttcatgcacagtttctgctcttcctcgctgagcggtcttatttcattcagtggttttatttcattttttatggattcttcaggttgtatcgtcacggacataaatacctcggtatctttgcgtaaaatagccaaaacccttcccctcaggcgctaaaaggccagagtgaaatgttgaaattaattattaattccgttcagtgataaataattccgttcttttttaatgttgatttattcagcttaactgtcaatgacgcgggaaagaatctgttatatcctgagaagcagctcacaatatatttttatcaaaacagaaaaaacaggcctcaaaaccccttcaaaacaatcaactaaaataatgatttttaaagaaaaaaatcatgaaatttataactcaactctgaagcggcgagccataaaaaacattatctacacgacaaagcctaccgacgctttaattattacctatatttagctctcacaaaccctttcataagcattcgagaaaaagtaattccaggcattccaaaacgatgaatcaaaccaaaaaaatctattttatgaccacgttacgaataggagagattaagtatgactcagataaataattaccttccgatacgaaatgaatggctcgcttcaggcactgaaatagcgcttgaacctgacaggcctattatcgatgcacatcaccatttttatgaccgtccgggttggacttatctacttgatgaatatctgcaagatgcgcagtcgggtcataatattcaagcctcggtttacatgcaggccttgacccgttatcgcgagtctggcgaggcgtcactgcgccccgttggcgagattgaatatgtcgccgaagtgaccgcgcatcagcaggctcgcaggccgcaggtggcgaagcgcatgattggctatgccgacttacgtctcggtgccgcggtgcgtgaggtactcgaagccgagatagcggccgggcaaggccgattggccggggtcaggcatctcgtgacttgggacgcggaccgttcgctggttaatccgctgtctgccgcaccgcaggggctgttgctggacaacgcctaccgggaaggcgtcgctcaacttgccccgcttgggctctcttgcgatgcctggctgttcttcccgcagctgccggaactgtttgatttggcgaagcgtttccccgatacgccgttcatcgtcaatcactgtggcggcgtagtgcggatagccagctatgcacagcatccgcaggcggtattcgccgcatggtcagcgtctatgcgccagctcgctgaattaccgaacgtgtatgtcaaactgggcggattagggatgagaatcaacgggtttgattttgagaaaggcgaacgtccaccgacctcagagcagcttgccgaggcatgggcccctggatgatgacctgtctcgaggcctttggcgcaggccgctgcatgtttgaaagcaacttcccagtggacaagggatcttatccgtttagcaacggctggaatgccttcaaacgactcacggccaccgccagcgagagcgaacgcgaagcgctgtttcgcggcacggtgagcaaggtgtatcgacttgaataaccggcccacgtcagccgccgagccacgaaccgttgcgcagaatgttcagcaggcaaagcaccggcggcgtcagataggcttcatcgcggtacaacaccccgaaagtgcgtcgcatcacggcggcgggaatcggcacctcacgcagcggatgacccggccgtcccggccccagattgcggcgcgaaagcaggctgagtaagtcattgcgggtgatcaactgcggaaccagcagaattgaattggtttcaatctgcacctgagcggacggcaaaccgctctcgttgagcagttggtcaagccagcgacgcgtcgaaaccttggccgacggcagcacccatcgctgcccggccagcgacgacaccttgccaggttgtgaaaatatcgggtgtgcggggcctgcgaccaccaccacctggtcatcgacgatgggatgggtggcaaaaaccccgtccaccgagtccagcggccccagcatcaggtcgatatgccccgcctgcaacaggtcacgcagccggtcgttcatccccagcgtcaactccattgtcacatcaggcgcactgcgcaaaaactcctcggtcacggcgggcagcagcagctcggccatggtggtcgaaacgcccagccgcacatgcccacgaattccccgcgcaaagtccttgagctggcgcttcgactcctcgacgccgcgccgtaaaatccgcgcccgctccagcagcagcgctccgctcggcgtcagcacaattccccttccgacccgttcaaacagcgccgtttcaagctcatcctccaaccgcttgatacttttcgacagcgcagactgggtgcggcaaagcttttcagccgcatgaccgaggtgccccagctccgccacggtttcgaaatacttcagatcgcgaaaatccatagtctgatctattcctgaaattcatcaatgagggaaaattagcacatagacttcaagaccacaaagtgagcagaatggccgctaatgcttatccaaaggagatgcgccatgcagacatattccagggattccaatcccgaggtattttcgtttcaggcgttgtgggataccgtgacccgcatcttctccgggtatctgcccgccaatgatgcgcattacgttgcgggctgtctggtcgaagccgaggcgcgcggcgtgcagtcgcacggcattggccgcattccggtttatacccaacgtttgcggctcgggtggtcaatgccaaaccgacgtttaaaattagcgcgggatccggcgctacggcgcacgtcgagggtgacaacggcatgggttatctggtcgccagaaaggcgatggacgaagccatcaggcgcggtcgggagcacggtatcagtctcgtgctggcctcgcagagtaatcatttcggcatggcggccacctatctgcaacaggccatcgacgccggacttgcagcactggtgctgacaaacgccccgccgctgatgccggtctggggtggacgttccgcctttctcggcaccagccctttcgccttcgcggcaccgtcacagcatacgcccgtcatgctcgacatggcgacgtcggtagtggcgtttggcaagattcgtcaggccgcccggcgcggtgagtctattcccgccgactgggcgcttgatgctcagggacagtccaccaccagtccagatgcagccctcaacggcgtggtgttaccgatgggcggtccgaaaggctccgggcttgggctgatgatggaactgattgcaggggtgatgtccgggagcgcatttggtggcgaggttcgaaatcagaacagcgattttgagcacccgcagaacgtcggccacgcgtttatcaccttccgccccgacattgccgtgacgctttccgactatttcgcacgtgccgattcgctggtcgatcgtgccaaagcttcgccgcgcgcagagggcttcgataacatcgtgatgcccggtgaaactgaggcgcaacgcgctgaaaaggccaaacgagagggcattgccgtttctaggcaggatactgtcatgctgcacgatgaactgatgcttgccgccgaggcacggcctttgagcgccgcgccgcgatagccgctttcttagtctcaacgcgtgatggattaaaagtcgttctaattgctcgaattatcaataatttgagcataatatcagcaagcggcgcgtattttgctttaaccctttgacatgccgagcgggagtcactattattcgcctcgttcacacgattcctctgtagttcagtcggtagaacggcggactgttaatccgtatgtcactggttcaagtccagtcagaggagccatatttagagaagcccgcttaaggaaacttaagcgggctttttgctgtaataaaccccgccacggcggggtttagagattttaaggcaggaatttaatatccgttggcgtgccgatttgaacggtaacgccggtgggtgttaatgcgccagtctcggcatcgcgatgcagttcaacgatgttgtttgagaatacgttggcaaccagcaaatattgccccgttttgtcgaatgcgaaagcacgcggttcaatccccccgctgagaaacgattgctcagggtcagcttaccggtcgtcgcatcggctttataaaccacaatcacgttgtcgcgacggcggttcccaacatacaggaacttgtggtcagggctgaacagaatacccgctcccccttattattcgggtcctgactatcggtgagattaatcacctgagtctcggtcagtttatcctgctcaatacggtaaacgtggacctgagccgacatctcggtgctgacgtaggcgaatttgccgtcggcggagaaggtcatgtggcgtgggccttcgcccggtttgaagtgcaggtccagtttaggctcggcgctaaaaggttctttattaccggcgtggtagctgaaggcatgcacggtatctgcgccgaggtcagcaacgaataacatttttccatcagggctgatgttcacagagtgtgcgtgaccgctcgcctgtcggtcagcaaccgcgtgagatccttcgataaagggtacgtgctggaccgccttacctaaggcgccattgctttcgatagggaaaatcgtcacccctgcatgccccggattcaccgagtagttcgcggcgagtaaatattttccgtcagtggtaatggtggcatgcgttgggtgcgcgccttggctatcgacctcattgataatgtgcagcttgccgtctttatccactttcaatgccgtcacggaacccgtttcgttttcattggtggtataggcaaacttatggtcatggctaaagacaatccacgacgggctggataactttaatacgtccagaggcagcagagtgccgtccgagtttaggcgcagacgataaatcccctgactgggataaatagctttctgaacgccttcaccggtggtttggccggtccacgatcccaccagtaatgtttgagccggcaaattttttgccgcgggtgctaatggagcgctttcatctgcataagacatattggcaccgaaaaataagggaattaaggcaatttttaaggcatgaaccagtagggtacgtttagattttattagggacatgaaaacctcattaaattaatgatgacggcgaatgttatataacatttactccttcttgttgacctctatataacgtttataacgtgaaatttttaatctgctaacatcgacccacagagctcggcctttgcaatgattgaaatcagcatcaacagcgaaatcaacaaagggtacgccgcccgcttcgcaacgttctgcgtccactttgtacaaggtcacattagcgtatgcgatatgaatcaacgggcttttcgggcgcgtcaaatgctcgaaataatcatctctggcaaactgactcggctcctccttgaagagtattgtagctaacaatgcgcgttgccgagcaaagccgggttggcggcactgatagctaagagcgaaaaaaaacgccggagcagcataacttgctccggcgttgagggtttttatgatggctttgggttaaaccgttttgcctttcagaaccacctgcccttctatctcgtctggggttttgaggaacggggtaaggatggcactcagaatatagagcccggcatagattgccagcacgccgcccgcgccgagcggagcatagaacaggccagcaatagcaggtgccaggaaggcgcccagacctgcgccgagatttagcaccgacatcgctgcccctttattatcgggtgccagcagagggaacagcgcggacagtggcacatagcccgccatcgtgacaccgcacaggcaaagcacaaaggtcatcagatagacgttgtgtcccgcgtactgcggcgtgagccaaaccagcatcagcacaatcgcgtagcagacgccgccaatccacatgatggtgttgcgccagccgaacttgtcgccaaagaaaccgaagaacaggttggcgaaaatggccaccacgaacaccgccgaccacatgtgcagccattcggtctggctgtaaccaaacttcgccaggtagataggcaggaacaccgccaggccgtactgcgcaataccgttgatcgatttaaccaccagcccggtggcgatacgtgggcgcttaaggatagtgatacaggtcagcagctcggccatagagaacggatgaatctcatcggcaggcaccttgtctttattaacatagatggccaataccgagccgataatcacgaacccgcagcccatccacagcacgtttatctgccccatcaccggcagcgccagcgaggagaaatacggccccatcacactcagaccgagcgagaaagtaaaccagaaccagccgacggcggtggcgcgtttctcgagcggcgaactgtagttaatccagatcagaaacgaatacgcaaacagcggataacccaatccacgtatcgcatagaacgggatcatcacttccatgttcagcgtcggcatgcccagtccgatgaagccgatactgcccaccacaaaggccagcagcccgtagagcatcacctttcttggccccagcgtctgcaccagcacgcccgaaagccacgccgccagcgtgaccgtgataccgtaaaaggtcagaaggaatgacgcatcagaaacctgcaaacctctccctaccaggtaaagagagatccacgcctgttctaatccatcacccaccataaaaagcgtgaggccgatatagccccacagtagatttgagggtaaacctattctatctaacatatggcctccagacattacgtcagtaatgcctcacaagagaacatgaaaaatatggattacctgctaattcactcgttattattgttataaaccgagatttataacttagtttcttgtgatgagtgacagcagcaggctttgaattttaatcgcgtcctgggatttaataatcgcatctatctcttccagagataccgaatcaatataatcagccaatgcattgtacattttgatattctgctcacattctctgaccgggtcttcgcggcttgggaaagtatcgaaatagaccagaccgtcaaacttatactttttcgcgtaatagatatattcgagcgtctgaagcaggtgaacggtacctaacattaatccatcgtcaaaatgaccgtagccatcatttaaatggaaccccaccagacgattacgctgtgccgacaggaacagtgaataagccggattctcttttttcataatcatgtggcagaaatcgagggtaatacccaggttatcctcaccgacatcatcaattaacatcaatgtggcgcaaacgtcaccgatcaaggagaaggtgcgtggctcgtaaggtttgtattcaaagctgaacgtaatatccggattggcagacaccacctgtttgatagcatccacggtgtctttgtaagcacgttcataatcaagctggaatggataatcaaagccgtcgttggcaaaccacagggtcacggtgttaccgccgagctcacggcagacgttaacggcttccatggtgatttcgatggctttttcacgaattttggggtctgggttgctgaactcgccttcgttgaaatgcttctgataacgcagagcaatcccgcctaacgccagaggagaggaggcaattgcatctttgatttcacccagggtattaagctggaaatgttccgggtaattcagttcgacgtgagtcagcccttttaccgacgccatacgggttatcaaatcaatggtatcaattttatctttatcgaaaaatagttctggtcgggatttgaatgaattaattcgtgaagagaacttcataataaaactccttaagcattttaaacaacgccgctacttataaagcaacgaagcctcaacgcaaaatagaaaaacgttgaacacttaaagttttttttcgagtgtttttaagcagtaaaaatttcactcttagtaaaatgattgagtaaaaaaacgcaccttaaacaccataagcgtgatttaggtaacacttttactctcaataaacatgataacttattgcttatcttactgcgccgctctccgagtaaaatacaaacagttaaagacgcgctgagcactacaggataataattacaatgcaacagacattaaaaggtagagagatattactttacgctaagacgcttgccccaacgttaggtaaaaaagaaagatctattgctcaatttatagagaataatcctgacgttatttcctcaatgcgtattaatgacgtctctacttttcttaaagttagcgttgcgagtattactaaagtttccaagaaactgggctgtcatggttttcatgaactgaaaaattccattagccaaataaattatcttgaggatgagcaactccagcaggaattctacgatcctgaaagtcatcaggaggtattggaacgtacggtgatgaactccattctggcgttacaggaatcgctgaccctgattaattccacggtcttcaatcaggttgcgcagctgttaatcaactttgacgagaaaaagaagctggttctggtgggctgcggcgggtcgagtgccctttgttatgactttcaccacaagctgctcaagattggtattttctcgaacgtttattacgactcgcatatgcagcaaatgtcggcttcattaatgcagcccggtgacatcgctatcggtatttcgcattcggggaaaacctctgacgtattccacatgctgaaaaccgcacgagccaacggcgcgagcacggtatcgattaccaactatttaaacagtccggtcacggtggtgtccgatcacgcgattgtctcatcggttaaaaataatccgatcaccggtgaaaacgcctcaacccgcatcgtgcacctgaacattctggatgccctcttcactatcctcgccaatgagcgcggacaaaagagccagaccaacttacataaaacacgtgattcggtattggcgaagcgcgtttaacctttgattggggaaatttgatgaaaactgacgttctggtaatcgggagtttgaacttcgacattctggtgaaacaggaaagactccctttggtcggcgaaacctttaccggcgaaggcctgctgcaaatgccgggcggaaaaggcggtaatcaggccgtccagtgcgcgcgccttggtctgagggtaaaaatggtcggctgcgtgggtgatgacctgtttggcgaggagctcatcaaatcgctcaaggataatgacgtcgcctgctcggacatcaaacagtttggcgcctcaggccttgggctggtacaaatactcaaaagcggcgactactgcagcacaattatcaaaggcgctaactacgcgcttgaggtcggtgatattaaggacagcttcttcgcggattccccgttggttatcctacagtctgaaatcgccccgaggtcgtcacgctggccatcgaaaaggcgcgtcaattccattgccctgttcttctgaacaacgctccagcgcgcgatatcgaccgggcaacgctgagcaaggtcgattatttggtggtgaatgaaaccgaggcggccttcatgctcggttacccggttgctcaccctgaagacgcccttaaagcagcaagagtactgcgcacgcaggtaagaaaagcggtgattgtcaccctgggtgagaaaggttcggtggtggtatcagatgatgaaaacggccacttcgcggcggtgaaatgtgacacggtggtcgataccaccggcgcgggagactcatacattggcgcgctgtcttacggcatcatcaaacagctgccgctggcggactcaattcgctttgcctccgaagtgagcgcattttcggtacagaattacggcggccagggctccttcccgacgctgaataacgttcaaccctgccacgcctattcgtaaaacgacgctctacccccgtcacagcttgagcgccggtgcaccgcatccggcgctcaacgcgttacagacccgatgaccattaccccttcactttgcatggaatgctttttctttcaaaactttgattccagacgcccatcaacagctaaacttcgtcctatacgcctcgaccccagcgccaaaacgcagagggcaaccctgcggtaaccctcaaacataccagctatttattgaatgcgtacagactacaactcttaatctcttcataacctgtcgaatatgacagggtgaacgagcaacgtgctttttcatgcaattgcgcatcattatactcaacgaccatgaccccacagccagcctgcgtcacactttcaacggtaaataattttaatatttcttatgggattgagaagaatgaaaacaattgttgattatcttaattacaatgccgagcattatgcaaagaaacacgccgttattatgcttaatgacaaaggtgaagaagctgagcgcctgacctacagtgaaattaaccaaaaaattttgacactggcgggatatttacagcaaaactttaataaaggcgatcgcgctttattactttatcgtaccggcgttgaatttattgtcgcttttatggcctgtgaattttgcggtattattgccgtaccgatgtctttatatgccaaaaagtcgccgcattttcaccgcatcgaacatattatgcaggacgccgcggttaatttaattttgaccactgaaaaactgcatggcgaagtcctggaatggctggccgaaaccccgtatgccgccacgccgtgcctgccttcagacgtgctggtcggcaaccgcccatggacctctgctgacgtgcagcctgaggatttggccttcctgcaatatacctccggctcgacgggtaaccctaaaggggtgatggtcagccacggcaatttgattcacaacagtttgttaatcaagcataaatatcaccatgacaacaacactgtcatgggcggttggctgccgttctaccacgacatgggcctgatcgggttaattcttcagtcgctgtatctcggctccacgctggtcttgatgtcaccggtggccttcgtcaaacacccgatgaactggctgaaagcgatcagcgactacaagattaacacctcaggcggtccgaatttctgctttgagcacagtattgaaaaggccaatgaccagaagctggaagggattgatctgtcgcactggcacgcctgtttcaacggttcagaaccgattaagtcgcagaccattgacgccttctcggaacgttttgcccgctttggctttagccgtaacctgttttatccctgctacggcatggcggaaaccactctgtttgttaccggtggcaccccgcacgtcgcacatgaaaccctgaccgttgaccgcgaagcgttggcggccaacaagattatcttccagacgcctgactccagctcagcggtcacactggtcagttcgggccaggcctacgacctcgacgtcgtcatcgttgacccggtctctcaccaacgactcgccgacggcgaagtgggtgaagtgtggatccacggcgagagtgtcgcccagggatactggggtaaacccgagcagacgcgggagattttccacgccgagctgtctccttccaacggcaagcactacctgcgcaccggagatatgggattccagcagcaaaatgagctttacatcaccggtcgtcagaaagatctggtgatcgtcaatggccgcaatatctatccgcaggacatcgagcagcgcatcaaagagtctgagccgctgtttgccagcggtctctcggcggcgttcgggctggaaagcgaaagaggcgaacgtgtggtggtggtgcaggaaatcgataaacgccacggactggagccggagcagctgacgcagctcatcacccgactgcgctttgaaatcggccgttatttcgaggttccggttgcggtcattacgctgattgcccgcggcacgctgccacgcaccaccagcggcaaagtgcaacgccgacgtacaaaagaaatgtggctcaagggcgaattaccttcagtatttggattcgatgaattgcctgtcgcaagcaaagaataaagccagataagtcgcgtaagtattaacgccagctaaataactttattatttgcagtaaggataattatgaaatctctctatgatttaacgctcgactatgagcggttcttcggcgatcccgctgatgagaaaaatacattctcttttaaacgagccaggcaatacgatattaactcgacatttcctgaagagtttattcgcgaactaaacgcctgggcctgagtgaatattatgtgcctgaagcgttcggcggtaatttaaaaggctacgatgaactttttaatttaatacgtctgacctcacgccgagatttaacggccgccatcggccacggtaaaaccatgctgggcgcaatttgcgtctgggtgggcggttcggatacccagcgtgcacgactggccgagtccatcctgcgtcaggatcaggtgtcgctggcgttgaccgaacaccctcacggcagcgacatctctgccaccgacacgctgtgcagcgagaccgaagacggttatctgctcaacggtgagaaatacctgattaacaacgcgcgtcgctcagcgtcactgacggtttttgcccgtacttcggccaaaaataacgcccgcgattttagcctgtttatggtcgaaaaggcgggcctgccggagaatgcgctgagctatgagcccaagctgctgactcacggcatcaaaggcgcagacatcagcggtgtgcgttttcacaatgccccgctccccgcctcttcgctggtaggccaaatcggtcagggtctggaaatcatgctctgcggattccaaatcagccgcacgctgtgcaccgccctctcatgcggtgctggtgaaagcgcgctgcgcctcgcctatcgctatgccgaacagcgccgcgtttatcattcctcgctgtcgcagctggccaatattcgccgccgcctcagtgattcggccgccgatctgctgattgccgacctggtcggcctgttcagcagccgcgccatcaacgtcttgccgcagcaaacgagcaccatctcggcggccgccaaggcctatgtacctgccagcatcgagaccatggttgacgggctggtcgatgttctcggtgcacgtgcctatctggaagacgacggcgaattcggccacttcagtaaactccagcgcgactgtcgtctggtgagcctgtttgacggcaatacggtcgtcaacctgcaagctttggtggtgcagctgccggtgctggcgcgccagcgtcgtcgccctatctcacagcaggaaatgcccgctctgctcgatgtgctgttcagcattgacgccccgctggaggcgctcaagcccgagcagttgaaactctccggcaaaggtcatgacttcattgtgcagggtctgtttgacgtacaaagacagctgaccgacgtcgaaggcctctcagcgaccgtgcagcaaaaactgagcgcgcaggtgagcgaactgttgattcagcttgcactgcttgacgatttcttcctgtctcagacgccgagcaagcaaatcagcgcgcagagctttgcgatggcggaaaactatacccggatctttgccggtgcctgctgtattcaggcattcatcagctcccatcggcatctggccgcgcattggaaagacggcaaggcgctctgtgcctgcctggccaggctagtagggacgcctgccgagtatgccgagccgctgatgcagcaagtacagaccagcatcgagcagcatcagctgatctctttctttccattgccgttggcaggctagagggcttacaggatgaatatcactgaagcaatgcatcaactccgtgatttgcaggcacgctccctagcctgcgtccggcctttattctggcgctcgacgaggcggcagagcttaatcaggcggccgaagccggactagacgctatcggcattccttcactgctggccaccgacgaaagtgggcaacccgccgttgccatgccggagctgatgaggctgctgcgcacgctgtgtgaacgagacctggggcttgggttgggctatatcctgaccacctttatggccgcgactaacgtctgggttgcaggttcgtccgagcaaaaagcccagtgcaacgccctgctggcggccggaaagaaaatttctatcgcctatcacgagctcgaacacggcaatgactttgctgcaaacgagttgacggcgcagcccgtgccgggcggatacctgcttcagggccgcaagcaggttatcaacaatattggccgtgccggtgccgtggtgttgcaggcgcgaaccagccccgagcagggaatgcgcacgcactcgctgtttctggttgatacccagctgctggccagtgaacagcatcataagctgccgcgttttgcgactcagggtgttcgcggctgccagattagcggcatcgaatttgaggcgtgctttattcccgacgcctgcctgctcggcaaagagggtttgcctttagctatgcactcacggccttccagattacccgcgcgctgctgcccggcattagccttggcactatcgacagtgcgctggctatcacggcgcgttatgccagccaacgcacgctgtatggcaacaatctgctgaccatcccgaacgttcgtgcagaactgacgctcgcctggctcgactatgcgctgtgcgacaacctcagttacgtggccgcacgcgggctgcatacggttccggcggagatgagcgtgctgggttcgctgtgcaaggcgcaggtgccgctgcgcatgcgcacggtgctgaaaaagctcgcgctggtgctgggctcgcgctactaccttcgcgaaggcgaggcggcgctgtttgaaaaaattatgcgcgattatccggtggtcagtcttgggcatgccagcagctttacctgtcaggcgtcacttattccccagttgccgctgatcttcaaacgcttcaacacgccgcgtgaagatctccagcagagcctgatcctgctgttttccccacaggtcaagcacgccttcacgacgggcgcactcaagctgacttcgtcgggcaaagacctgctgttgcacagcattcactactggccggagcacgtaggcgcgctcatgcgttcgcagagcatcagccagccggacggcgatctgctgcttcagcgtctcggcatgctgcacagtcactgcgtgcagttgagcgaaaccaccttcgccgccgacgagtatcaggccttcgagactgttcagcgctatgcctggatccagtccgcgctggcaaccgtgggccgctggtgtctcgactccacgagcccgtttgccggtgacgttaactaccttgtcacctgcctggattttgtgttttcacaattacgtcactgtcctttttatcccgacccaaaggttgagggcaacatccttgcttacctgcaatcgcgcagtgaagcacgtggcggctaaccgccgtacgactccaaattcttaacttttaaacaggattgatcatgtcagacaaaatgacccaagtgcgtatcaccgactttatcttagaccgcctttcggcccagacgcaccagcctaaagagaacatcgacatccagttaccgctggcaaattacggcgtcgattcaattcacgccttaagcctgtgcgcagagctggaagagtggctgaacatcgaaatcgaacccacgattgcctgggactacccgacgattgcgcagatggcggagttcctcgaatccgaggttactgccgcgtcacgttaatgccgagaggagaagttggaatgaaagagtctggaatgaacgccgacaaaatcgccatcaccgggatggcctgtcaatttcccggtgcagagaacctggacgcttactggcaggtggttaaaaacaacaaaatttcgacccgccgtagctcggtcaacgcccagcctgccgactattgccgccgccagctggcgggaggatttatccgaggcgtggatcatttcgacgccgaattttttggaatttccaatcgcgaagcccaactgatggacccgcagcagcgcctgttgttgcaaaacgtctggcacgccattgaggatgcggggatcgcgccacagtcgctgcgcggcagtaaaaccggcgttttcgtcggcgcgatggccaacgactgggcggcgcgctcgattgccgatgacgacaacatcaacagccatatgattaccggcaacggtctggcgattatcgccaaccgcgtgtcgtatcattatgattttaaagggccaagcctgagtctggacagcgcctgctcgtcttcgattttagcgatgcactatgccgtacaaagcctgcgcaacggcgactgtgagtatgcgctggtggcaggcgttaacgtgattgcgacaccgatgctgcaaaagttttatcagcgcgccggtattgcctcggttaaaggcgaatgtcacccgttcagccgctacagcgacggcattgtgcgcggcgaaggcgtcggcgtggtgctgttgcagcgcgtggcgcaagacacgggcacctacgccacgctggcgggctgcacggtcaatcataacgggcaaagcaacggcctgtcggcaccgaaccgttttgcacagcaggcgctgctgtcgcagacctatgagcaatgggggatttccccggcagagatcgattacgtcgagtgccacggtaccggcacagagctgggcgacagaattgagcttcaggcactgaacaacgtgcttaatgtcccagagcgccagcgtccttgccacatcggctcggtgaaaggtctgattggccacaccgaggcggcagcgggtatcgcgggcgtcatcaagctcgccctgatgctgcatcatggctatgttccggccagcctctatgccgacacgccgaacgccattcttgagaaaaacatagcgctcaagctgccgccgctcggcttcacgcttgagcaagacagccgcacgctggtcggtctgagcagcttcgggcttggcggcaccaatggtcacctggtcctgcagcgcgccgacgcccgcgttcagccgcgttccgagcctcgccagccgcagctttttaccctgtctgcgccgactgccgatacgctggcggatcaggcacgcgccttgtcgagctatctcgatacgcatccagactgtgaccttgccgcgctggcgaccgagtcgcgtgaggtgaaaagcctgttacgggcgaaaaaggcttgggtggcatcaaccgccgacgaactgcaaaaacagctgcgccagttctcgctcagcccgaatacgtcgaaaaaaccgcacgccttaacggcgctgtatctcgcgagtccgtcttcggcagcgctctccttctgcccgtcgttgtttaatcatgcgccgtcgtttcgacaagccatcgagcgctgcgacagcctgttttatccgctgctggggcattcggttatctcgcaaatgttcgccaacgatgcgccgctctctccgggtcagcaaagctattggctccccgcggtgttctcgtggaactacgcgttgtcccaactgtgggccagcgaaggtattgcaccggtaagcgtgattggcgaaggcgtcggcgaatacgtcgcggcctgcctgtctgggctcctcacgctggaagatgcggtctatctggtcgcacagcacgccgaaatactgcatttgcagcaagtgctgacctgcgatgacttccagctggaatccaccgcgccgtttgaaaagtatcagcagtattttcaccgcattccagagcgagagccgcacacgccgtttatctcctgctaccagggtcaatcggtttcgctgctgccgccgcttaacgaatggctgcaactgttcgacgaaggccacgcaggcgctgaaggacgtcaggctgggctacaggcctgcggcagtcgtctggtgctttccaccgtcgcagctccggcggaacgcggcgagattcagtgggtaagcgaaagtgacaccgcgaaagacgcgctgcgccagcatttgcaggcggtggctcagctttacgaccacggcgtcctgctcaacctgaatcggggcaagcgaggccagtgccgcagcaggctaccggcctacgccttccagccttccagcttctggctggagccggtcacccaggccagcgtgactcgcgcacccgcttcaacgcccgaaagcgttgccctacgccagcaagaccacgctggcggtgagtttgtggtgacgacgctggcgaggatcctcgcctgtgagcaacaggccatcaagggcaatctgcgtctgagtgaagaccttgggctggactccatcatcgtcatcgaactgatcgacatcctgaataaagacctgccagagaaacagaaactggcgtttaccgacactctgaccatcgtcaccgtcgatgacttaatcaatcgcgtcaccacgttgatggaaaacggcaaagccgttgctgaggagaaagtatgaccatgtatatcaagggcctcggactctgcacgcccggtaaaccggtcagtaatgcagcgctggcgcagcgctttgccctcaatgaagagtggatttcactctatctgggcaaccaatcgcgctatttcgccaccgacctgaacagcggcgttcagcactattcgctgatggatatcgcccgtcaggcggcgattgccgccatcgacaacgcgcagatcgataaaagcaaaatcgatttcattattctggcgacggcaacgccggacaagctgatgccggccacggtcaacgaggtcgcgcatgaccttgaaatgttcaatattccgacctatcagctgcagtctggctgctgtggagctatgcaggcgctcaacctggccaacgatctgctgtccgtcggtcgttatcgctacgggttggtgatcggcgcagacatctgcaacaagttcatcgatcccctgaaggattacagcgattcgctggcttcggaaatcattaacttcgcgctgttcggtgacggtgccggggcggtggtgctgaccgccaacgccgacgaaagcccgctcgccatcacccatttgcagtatcggatgaccgaatctaccctgcccgccgggcaaatcgtcaactggcaaggcagccgcatcatcgagcaggagatgctgcgcgaagattacaagaacattgaaactcacgtgccgctcatcgccgaagagcagctggggcgcatgctgtcagcgcttgaggccacgccggacgaaattgactggttcctggtgccgcagctgtcgggccgcatgaccacacggctcatcgacgccctgcgcttgccgacggaaaaaaccatcaactgcgtggcgcaaaccggcaacaacggtaacgccctgttgctgttccagctcagccacctgctggagacctttcagccgggtcagcgcgcgattgctctgacggtcgagtcttcacgctggctgagcggcggtctggcgctacagcatcacggagtgaaatgatgacacaaaccctttaaacgcgataaccgccctgcgcaaggcgggatttccgaccgacgcgctgccttcactccagcgccatctcggggccattagcagcgccgatgaccgattacacgccggggttaacctgcgcacgctagcggcagaggcctatcgcgagcagggtggcagcaccttccgtctcgccgtcgtcagtaatttctcctatcagacgatcgccgatacgctgcgcagtcgtctgctggcgcgcggcatgctgcctgaattttacctgtcggactacaaccagtatcactatgagttgctcaacgccgacagcagcctctatcgttcgtcgcccgagctgacgctttgcctgctcgacggacactcggtgctggacgaactaggcccgaactggcgtccagaggatattgaacaagggctgcgcaacaagctccaccagctgacacagtttgccgaacagtaccaccagcaggccaacggcctactggtcttcaacacgctgccgctcagcggcaagacgctacagcagtgcctggactatcgcggacgcgcgcgcatcagccgttggtgggcccaatttaacgccgacctgctggcgctggcggaaacctatcgccacgttttcgtcatcgatactcaaagcctgctgagcgccgacttcccgctgcgcgatgaccgcctgggattctatgcccgcacgcttatgagcaacgaactgctggacgccctcgccggtgaagtcgcggcaatggtgtttgccagccgcggcatggcgaagaaatgcctggtgctggatctcgacaacaccctgtggggaggcattctgggcgatgacggtatcgagggtatccagctcagcaacagcgccaccggcgaggcgttcgtgagcttccagctggtgatcaaacgcctctcagcacagggcgtcctgctggcaatcagcagtaaaaacgaacgcgaaaacgtcatcaaccttctgcaacaacgtgaagacatggtactgaaaatagatgatttctcggccatcgtcgccaactggcagccaaaaagccatgccctgcaaaccatcagcgagctgctcaatatcggcagcgacagtctggtgttcgtcgatgacagcgcgttcgaacgcgaagaggtcaggaatcagcatccgcagattagcgtggtcgatcccggcagtgaccctgccgaatacgccgccgcgctggtcaaaggcaaccacttctgccagctggaactgaatccggaagactaccagcgcagcaagctgtatcagaccgaggccaaacgcaaatcgctgcgcaatgcgtccacctcgcttgaggcgtttctcgcagagttacagctcaaactgcggctcttcacgccgcagggacaagagctggctcgcgtcgcccaactgagcctgcgcaccaatcagttcaacatgaccacccgtcgcatgagcgaaagcgaggttcaggcttatctggcccagccgcagcacggcatcatcgctttgcaaagcagcgatcgtttcggcgaatacggcgtcatcggctgcctgttctatcaccgcgagcacaacagcctgtggatagacaacttcttgctcagctgccgcgtgttctcacgacagttggaaaccgccgcgctcaaccatttcctgagctgggcgcagcgtcagggctgcgaggagatccgtgcacgctatcttccgacgcagaaaaaccagcaggttgccgatttttatacccggcacggcttcacgctcagcgagggcaacgcgcagttcagtgaatactgccatgcgctcgaggctcctgccgttgtccctaaccacattgaattgattgcctcatatcaggagacacctttatgaatacgccctctgaatttttgtctttcattaacggctacatgacgaccgatgcaaccgaagaggagctggatgtgccgctagtcaatctggagaactgggattctatcaacgccgtccgcctgatgagccgcctggagaaggagctgaatgtgcgtctgccggtggcggattatctgcaggccaacacgctgcgccagctgtttgacctgacccgcaggagcgcagcatgagccacactcagcagccttttccgaaacagcgccagcatacgctgctgtttctggagcagtcgcatgcctatcgtcccgtgtctatcgacaccgacgtcgagatgacggaagtggtgcggcatcgccagcagagcggcaagcgttacagctatctcgcctactttattcaggcgatggcgcaggtggtggcggagtacccggcggcgaacagcatgctcatcggccagctgtttccgcgcttggtgacgctcggtgaggtgaacgccaagtttacgttggataaaaccgttgacgaacagcgcgtcgttgcctctgccgtggttgagggcgccgaccagctgtcgcttaccgccattcaggcgcgtatcgactacttcaagacgcaggaaattgccagcgccgaagtcttcgcgccaatccgtaagatccagaaagcgccacttctgctcggcaggctgctgtttcggttggccatgcgccgcccggaggtaaaaagccgcgtgcagggttcgtttacggtgacctcgctcggcggccgcgccgtcacgcgctttgtcccgctgccgggatcgacgctgacgctgggcgtgggcgatatcaccgaacgtgcgtgggtcaagaacagccaactgacggtggcccatgctactacgctgacgctggtgtttgaccaccgcattctcgacggcgcagtttctgccgagatcctgtcaaaaatcaaaaacaagctggaaaagttcgccttcgacaacaatgaaaacgtggcgcaactgcccgctgcctaagtttcccaaagaggaatgagtgatgactgatatctgtattgttggcgcagggcctgcaggattagtactggctttacaactggccagagcgggagtggatatcactctgcttgagagttcactgagctacaaacgttcgtttcgtggtgaatccatgcagccggataccgtaagtattttcaaagagctgggcattctagatgacctgcttgagcacggctgtctcgagacgcaccggatgatgctgaccgagcgcggaaagtcgctgctcaccattaactacaccaaggttccctaccgccacaagtacgtgatggatattccgcagccggtgctgctgagcgcgctgcttaagcgtctggaaacctacgccaactgcaagattattcgcggcgcgacctgcgacgagctgctgtggtcggataacaccgtcagcggtgtgagctatcgtctgcacgacgagaaggaacctcgcgtcctgcgggcacgcgttgtggtcggtgccgacggtcgctacagcaagattcgcgacctcggcaagattgaatggaagaagcatcaggcggcgcgtgacgtactgtggttcaaggtgccactgcccgccgatgcgcccgagaataccgctcgcattatgatagatggcgctaaccacctgatcctgctgcccactttcccgactactaccgcgccggtgtcaatatccctaaaggcgggtttatggcgctgcgtcgcgagggaatcgagtcattttatcagttggttgatggcatcgacgcgggctttggcaagcacgtgcgcgagcatgtccgcaactggaacgacattcacctgctggatatttttaccactaccgcgccgcagtggggacgtgaaggcctgttgctgataggcgatgcggcgcacaccgtgacgccgctgctcggtcagggcgttaatttggcgattcaggatgccatcacgctggccccgatgctggtcagtgggctggagaaaaacagtgtcgatatctcgctgttcaaggcgtttcaggccaagcgccaggccgacgtcgatttcgtggtcaatttgcagcagcgtcaggaaaaactcctcggcgcacatacgccaatgcagcagtttttaaggcgcgtcaattattgcgcccttaaccaattcactttcatacagcgcaagattaataaccgtatcgcctaccgcagacagctccagctgcaactctttcaggaaggaggctaagcatgcatcgacaagaagaagcagaatatctcgaagaactgaaaaattttgtcctgctgcactgtgaggctcagcagctcaaacccggcggcgtcaaggagatccttaagcggataacccacgccgaaggcagcgaagcgggcagctggaccgcagaatggtgcagggtcgcgctccagatggaacagctgcaaaactggtctgatgccgccaagctttacaacctggcacgttttccgtttgtcgaaaacgagatgcagcaaacggcgcacgacgcctgcatcgaaaacttcgagaaatcgatggcgcaggccaaggtcaagtttgagacgctggtactcgccgaaggagcctttaaagcctacgccaccggattggacaaaaactggccggtggtggtggtgtgcggcggcataatctctatcaaggaacagtgggcgcgctttctcctgatggctaagcggctcaagctgtgcgtcgtggtgaccgagatgccgggcgtcggtgaaaacactctgcgctatacgccggaaacctggacgcttttctcgcagattctggacgcggtgcagagccgtgccgatacccagcagtgtcatttgatggcgctgagttttagcggtcaccttgccctgcttgccgcggcaaaggacagccgcattcgcggcattactacggtcggcgcaccggttgccagcttcttccgtcaatacaactcgacggcggtaccgctggcgacccgtcgcaccctgtcgcatctaacaggtttggcgcgggaatcgctgttcatccagatgcccgactggcagattacccttaacgacgcgccgaagctggctatcccggtgcattatttgcaaagcgagtatgacgaaatcatcccgtcatcggaaattcagtcactgaagaagattgcggcggacgcacgggtgtattgcctggcagacgtgcacggctcacccaataacatgcatctggtcgccccgtgggtgctggcgtccatcatggcaagcttcccgtcgcgtaagaagcaggcgctgatattcagaacattatggaaagccaaagcgttgctgagccgtcgccgaaatatcgctccgccgaagaaagcagaggttattgctccggtgctgagcgggaaagtcgggagcgactgatgaacgatgccgcaacgctcgaacaggataactggctggcgcatacgttggcgcacgacggccgcttgaatctgctctgcttcccctacgctgggggaagcagtgcgattttcacccgctggcggctggcgctgccagcgtggataaacgtctgcccgctggtatttccaggacgcgagggacagcacaggcggccgaaggaaaccgactttcggaccttggcggagaaggtcgccgaggctttgttaccgcagctgcctgaggtaaattttgcgatttatggtcacagcatgggtgcctggttcgcacacgatttggcgttgcgggcgagtcagcgtgggtttgcaccgcgtgcgctactggtcagtggccagcgtgcgccgcagtttgcctatccgtttaacgccaaccgcgagatggacgacaccacgctgctgaagtttatcagctcgtttgggggtttggacgcagagctgctggcgaataaagcctgggtgagctggatgctggaaatagtgcgggccgatttatcgctgtgcgaatcgcatgcccccgtaaggcctgagataacgctgccctgcccggtgcatttatttgccaatgacaccgatccgctggtggatatttcagctcagcggccgtggaaaaacagtacgacggggcaattttctacatcactgcatgaaggcggacatttttttattcgcactcatgtcagtgattttcttaaaaagctaggttccgtattggaacaattaccgctatcgcgataaaaagaggaattatcatgcaattacagcatctggtcattgtacgctgtgaaaatctgctcttactgctttcgggcctgacgttgtattggcactttcacttcagctggctctatttctgctatttcattctggtgcctgacctggcaatggtgggctatttatttaacaatcgcgccggtgcatttttatataatctgacgcataactatgtgttgccgattatattgttagcattctatcccctctacccacaggtgttaatgctagcgttaatctggattgtgcatatcggttttgaccgcgcgctgggctatggcctcaagagtccacagggcttcaagaagacccatcttctctctgaataaatgcgttacggcgtatcatccggataaattttcggccggatgatattgccgaggatacccttggcaaccgcgtgctggcgattttttgcgccaaatttctcggtcgcattattaaggtgaaacatcaccgttctttcgctgatacataatatcttcgatatttcccatgaggtctttccttcacaggcccagaacaggcagtcatattcccgcccgtcagtttcaccttgtccagcgactgttctttgttcatccagttattgcggttgacgctttcgagcaaatggctggttaacagcatggcgtaaggcgtgaggatattgaagctgttttcactcttgtcggccgtctggcggctaatcagactcaacattcccgacccaccggtgacggtacgcagtggaatactcagacccgacgttaatccaaaacttttcgcgttatgcatcatgacctgaaactgcgaatcgcggtattcaggcaactggataagcttatgccagtggataggcaccgtgttagagaaacagtaagcggttatcggatcgatgcgctgaaacccgcgtcgaaaatagaaatcgcaccagtctgccggcaggttttcgatgatcagaatatcagggtcagccagagagcttgagtgacagagagcgaacataaaatagtcgatcccggcctgtttaaaaaaattgccgcagatggcttgcagcatttctttgctatcggcacgctgaattttctgtagagtattatccagtgcctgaaacagtaaattgctatccatttcctctcctgttttgacatcgaggctaacgttttgttatggttttataattcttgtcaccgtgggaattttattacctaattgataataaaagactttttctgctttcaatttgaatgggaagcccattctttgaagggaatttgtgcaagggagtcgtaaaggaacaaatactatggtccaatttcttatatgagagaagtaaaaaaataatacataatgttaccatgaataatgcgctagcgcctggtaaaaggtgccgagtaagatttaacctagaaaggcgaaagcgaatctataaccacaatcgtaataataattttaccgtcaaacgcatagcttccctttattttaacaccggctgtaaatacctcatttaaatccctgttaaatcttaagacaaaggttttatttagcgtattaattgaatcgacagaagcatattcaaatccaaagaaagtctttacctgaggatataaggccttaaataaactttcttttgccgagaatgccagcaacaggctaaagtccagatctatcgccagcgtttgcagatactctcgctcggcaggctggataaaggtttcacagatttcgcgtaaaacctcccggttaagcacctcgatatctgccccgagacacagctgtgggcgagaggtcacgatagccatcgcctgactgtatccgtccgacaccgtgccgtgagatattgtgccacgcatcccctgaggccagcaaggtgagcggtcttgatgggttgtcacctcggaggagaccgagaacccccgcaacagcgcagcgcagcagtaacggcccgccaggtattccgctttacgttttggcactgcgcgcgtcaggctgtcaggcttgttgatggcgtatctggcaaaatcctcttcgcgataagcctcggtgcagaagctcaccttgagatagcgcacgtccgcatcatcaccgataacgccgtattccgtctcaacgataaaatcatcaagcgtggcgtgcttttgcggcgtcatcatctcagcggtctcttagtctgcgcggacaaacggcggcggttcgaaggccgtcacgtcgggcagctgcccctgccaaggcgctatctcaacccagcagctctgcgcactgcatccctgccccaggcgcgagctgccaatgtcttcggtaagtacgttcggattcccgtgcttgtcgagcgagtttggctggctcgagtcctgcgggtcgtaccaggcgccggtcgacatctgcaccacgccgggccgaatgtcttcgctcagatgtaccccggccaagatggctccgcgcgagttgaataccttcaccacgctgccctctgtcacgccccgcgcggcggcatcttcaggatgcagccacagcggttcacgccctgaaccttggtacggcgactctcgctgccctgatcgtactggctatgcagacgcgttctcggctggctggacaacaaatgcagcggccagcgggcggccatttcacgctgcgcctgcgcgtccggctcataccagaacggatgtcccggacactcttcatagccaaaatctgccaccgtctgggagaacagttcgattttaccggacggcgtttccagcggcgacgcctgcgggttttcgcgaaacgctttgaggaagatttgcggcgcgtcaggacgcgcatattccagtttcccgcgctgccaaaactcgtcgaacggcggtaactcaatgccgtcggcctgtgcccgtgggatcgaactttcatacataaagcggatccacgcctcggcgtcacgcccttcgctaaagctttcgccaaagcccagacgctcggccagcgcgtgaaaaatcgcgtagtcgtcccgtgcttcaccctgcgcaggaatatgctggcgcatcgcaatcataaatccgtcattgctcgagctgccaatatcgctgcgttcgagagaggtggtcgccgggaagacgatatcggcgaacttggcctgcgcagtccagtactgctcgtgcaccaccaccgtgtcaggctgacgccaggcctcgaccagtcgattcaggtcctgatgatggtggaaggcgttaccacccgcccaatacaccacgcgaatatcgggatattgacagtctttgccgtcgaactggtagttgccccaggattgagcaacatgtcggagaggcgcgcaaccggtatcttgtcgctcaccgcattctgccccgccgggaaacgcgggccagagaaggtacgacgatcggcaccggccagattagtactggcataagcaaagcccagtccgccgccaagggtccctatttggccgatgagcgcggccagcgccaccgtagcccagaacgtctgttcgccctgacgcgcgcgctgcaacgaccaggcgatattaatcatcgtgcgtttggccaccatctgtcgcgccagactgcggattttctctgcggcaattccggtaagcggtgccgcccactctggtgatttggcctgcccgtccttttcgcccagcagataggctttatactgtgcgaagcccaccgtgtggctggcgacaaactcggcgttatacagagattcttcaatcaagacgtgggtcaacgccaacaacagtgccgtatcagtgccgggtttcaacgacagccactcggcgttggtgacgccggaaaggtcatttttgaccggactgacgttgataaaatgggtgccgttttgctgcatctgtccgagccagtgcttcagggagtgatcgttcgctccgccgccgttgacctgtgcattgcgcagcggcagaccaccgaacgccacaaacatctcgcagtgctccgccagcgaagaccagtgggtgtgctgtttctgcaatacgtcgaggtcgccgataatgtgcggcaaaaggcgctctgcggccgccagactgtaggtgttggtgctgccggtatagccgcccaactggttgaaaaagcgatgcagctgactctgggcatgatgaaaacgccctgcgcttgaccagccgtaggatccggcgtaaaacgccccgttgccgtaggtattctttacccggctcagctcgtcggccactagcgctaacgcagtctcccagctgacgtcgacaaaaggctctttgccgcgcccgtggcgagaatcgcgcccctgcttcaggtaaccgaggcgcaccgccggacggcgaatacggcttggcccgtgaaccgcatcgaccagcgattgaccaatggccgagggattgcggtcccattcaaccggttcaatcgccgtcagcgtgccttcagaggtcgtgacgcgataggtgccccagtgcataacggcgagattgtgttcggttgtcatagatatcgattctgaagtgtggcgtaaagggggagtttaccgcagtcggcgggattaattaagtattccgactgcggcacaaatgattgacgcaagcaacgctcaggctctagtggcgtttatcaaccttagcgacaatacggtcaccgagccactgaataccgcagaccatcacgatgagcaccacaatcacctcaaccatgacggtggtttcaaaccgttgatacccatagcgaatggcgaggtcgcccagaccaccggcaccgatagccccggccatcgccgacgcaccaatcagcgccaccagcgtaaccacgaaaccggagagaatgcccggcagcgcctcgggaatcagcacgtcccagacgatgcgcagcttgctggcgcccatcgcgcgcactgcatcgatcagcccgcgatcgacgtcacgtagcgaaacctctgccacgcgggcaaaatacggcgttgcggtgaccgagagcggcaccatcgcagcccatacgccgagcgaggtgccaatcagaaaacgggtcacgggaataagcgccaccagcaggatgataaacggcagtgaacgaaaaccgttaatcaccaagcccagcgaacggttgacccagcgattctcggcgatgccgccggggctggtcatcaccagaatcaggcccagcggcagaccggcgaccagagagataaggccagaaatggcggtcatcaacagcgtgtcttcaatcgcgttgatcagtaaatcaagcatcacgggtgacatagccaacgagctccacttgtgcctggtgctgctgcagccagtgtaaaattgtctgttcggcgtcggtattggcaaccggtaccgagaagaagaaacggacgacggcgtaatgctgaatgtgctcgacgccgccctgaatcaggcggaactgccccgccagctcggaggacatcagggtaagaatttcgccctgtcggtcctgtcctgcatagtgcacgctgtaaatcgcctcgccctgccgcgtctgcgtcaagcgttcgctgagcgcctcgggcagctgcggcagcagtccgctgagcaaggtacgcgttagcgcagtcttgggatgcgcaaacacctgccacaccggcccctgctcgattatctccccggcgttgattaccgccacccgatgcgcaaccttcttgataacctccatctcgtgggtaatcagcagcacggtgataccgagtttctgattcaacgattgcagcagcgcaagaatcgaacgcgtggtttctggatccagcgcagaggtcgcctcatcgcaaagcaggagggccggattggcggccagcgcgcgggcaatccccacacgctgcttttgcccaccagaaagtccggccggatactgcctggctttatcctccagccccaccaacgccaacagttccgccacacgttcatggcgtttggccttgtcgtaacccgcaatcttcagcggcagcgccacgttttgctcgacggtcttggccgacagcagattaaagtgctgaaacaccatgcccacgcggcttcgcaccgattgcagctgtttctcactcaggccggttatcgcatggccttcgatttcgatcgtaccgtcgtcgggctgctccagtccgttaagacagcggatcagggtcgacttgcccgccccgctgcgaccgatgatcccgaggatctcccgcgtttaacggttaatgacacatccttgagtgcctgcgtattgccgaatcggcgattaacgcgatgcagacgcaccacgtcttcaacatcttcggcgaaagggttgcgtgccgtctgcgaggaagtactcaccgccgacgctttggcgtgtttcccgtccggcgtattggcggtaaaatgtgcctcggtctcagagattgctgtcatactttcaattccttaccaggttgttacgcctgtccctttataaacctcgttaaacaccgttttcaccggttcgttttgataagaactcaccaacgtcttgacccacgttgcgttgacgttctctttctttacggcaataaagttggtgtaagggttatttttaatcggttcctgcgcgatgcggtcctcgggagtcaacccacttttcagcgcccagtcggtgttgacgacggcagcgtcgaggtctggcacagaacgaccaataacgccggagtccagctccttgattttaagatgcttcggattggcgacaatgtcggcggtggtcgcggcaatccctgcgcccggcttgagcttaagcagcccctgctcctgtagcagcaccagcgcacgcgcctcgttagaagggtcatttggcacccctatcaccgcgccgtctttaaagtccttcactaatttcactttctttgaatagaggccaatcggccataccgccgtgtcacccacgcgcacgatatcgtagtgattcactttgatttggttgttcaggaaaggctgatgctggaaggcattggcatccacctctccttcctgcaatgcttcgttgggctggttgtagtcgttaaatacgacagttttaactgtcagccccttggccgctgcctgcttgacgacttcacgccatacgtcttcatcttcgccgctcataatgccgaccttaatggaagacttatccgccgcgtgcgccaccgaaagaggtgccagaacaccaccggtcaacatggtcgcggctacggcggccagcaggaaagcgccattaacgttagttttggttttattgagcaatttgcgcatgagctacccttataaatgagaggatccggttggttttttgtgccggaatgggggaagtatactcacgggcatatagctttataatttatttaattagatatctatatcctttttgcatataaagaatagcgcagctgcggccctttaaatgcagtaaagaagatggccagaaatcgttaaaaaacctgaaaaatcggagtgttaaattctccgcatcaggcggcaaactccgtaacatatcgccacaaattaatgataatgcttttcatttgcagcagataatgataattattacccgcgaaaaaacctccctctctttctttaaaagataaccaggacagcgcgatgcgcccactgcgaggctcgcggcaggaaagggacaatgattaatttatggagaaaatgatgtcatctcgttttacaccggcgaaatctgcaatgacctcagcgctgctgctgacctcagtactgttctcttcctctctgttcgccgacacccacgtgtcgatggagagaaaagcggtcggcaaaggcgtgtacgagctggcttacagcgcagatcagaaagcgctgtttgttgcctcttcacagggacgtcaggaaaagaacggcgtgctttatcgtctggacccaaccagccttgccgtgagccagtcaatcatgactaatctcaagccgtttggcgtggcttttaacaataagaccgataccgtattcctgggcaataccaccagcagcgcgattacctcggtagacgctaaaaccaataaagtgctgaaagagcgggtgttggacagccgcccgcgcaccgagaaagagcgtcccttagcgccacgcgagctggccgtggatgaagccaccaatacgctttacgtcgccggtctgggcaaagagagtgtgatttgggtggtagatggcgcaaacctgacgctgcgccacaccattgaaggcgtgggtaagatggcgaccggtctggcgattgatgccaaggcctctcgcctttacatcaccaacggtgataacgaattcctgaccatcgatactaaaacagacaagatcctgtcgcgcgttaaaatcgataatccgggtgagcatttctacctgaatatcagcctggataccgccaggcatcgcgcctttgtgactgattccaaagaggccagcctgctggtattggacaccgagaacggcaaagtgctgcaaaagattgccgttccagcctcgctggccgtgctgtttaacccggcgcgtaatgaagtttatgtgacccaccgtgacgctggtaaggtcagcatcatcgatgccgacagctataaagtgcttgaaacgctggatgtcccaacgcatccgcagagcctggccgtatcagccgacggtcagacgctttacgtcagcgtgaaacagcagtctacccgtcagcaagaagccacctcgcctgacgaagtggtgcgtatcaccttcaagtaagtccgacgtccctcgtcaccggcaagtcagcgccaatgacgagggtcttgttactccccgctcttttaccccctctactcattgactctcttccggcaaccgcaccccgcaggcaaagtgaactaagtcttccccgaccggcctgaggctaattttgatacagaggctatatttttagcagcgcgctaatccttgcctcttaacatcgggagttgccatgacacgtctgaccgccaaagatttcccccctgaactgcttgaactctatgactactacgcccacggtaaaatcactaaacgcgaatttctgtcaatggcggccaaatacactatgggtggcatggccggtatgacgttgctcagcgccatgagccctgactatgcgctggcgcagcaggtcgaattcaccgatccggcaattgtgccggaatacatccactactcatcgccgcagggcaatggcgaggtgcgggcctatcaggttaaacccgccggggcgaccggtaagacacccgccgtggtggtggtgcatgaaaaccgcggattgaatccctacattgaagacgtggcgcggcgcgtagcgaaggccggatttattgcgctggccccgatgggctgacgtcggttgggggttatccgggcaatgacgagaaaggcaaagaacttcagcagacagtggatcccaccaagctgatgaacgacttctttgccgcggtcgattttatgatgcaccaccagcagactaacggcaaagtcggtattaccggtttttgctatggtggcggcgtcgcgaacgcggccgcagtggcctttcctgagcttgccgcggcagtgtctttctacggtcggcagcccaaagccgaagacgttccgcgcatcaatgcgcctttattgctgcactacgccgaacgggataaaggcatcaccgacggatggcctgcctacgaggccgcgctaaaggcggcgggaaaaacctataaaggctacgtttataaaggtgcgaaccacggtttccacaatgattcaacgccgcgctacgacaaaaccgccgccgatctggcctgggaccgcacgattaaatggttcaggcaatatctggtctgattgaaacagacgaaaatcgcccagcctcacaaaacgagaagataaagaatcaacatcgttgcgccctactgcacatcccctataagtttaactttatgtttccgatatgtaaccaagggttaaaacttatgttaattaaattcaaaatatctctggtggcgctgttagttatcgtttcaactcaggccttggccgacctgccgcagggttatcctgcggattatcagaaaacggtagagggagcaaagaaagagggaaaagtggtggtctattcgaccaccgataccaaagcggccgggccgttgatacaaggctttgaggccgcctatccgggggtaaaagtcgaatacaacgacatgaacagcaccgaactctataaccgctacatcagcgagcaggctgcgggcggcaccagcggagacgtggtgtggagctcctcgatggacaccgcgctgaagctggccaccgactacgctgcagaatatgcttcgccggaacaaagccagctgccaaagtgggcggtctggaagaataaggcctacggcaccacctacgaaccggtggtgtttatctataacaagcggctgatcccagcgggtgatgtacccgattcccatgctgcattggcgaagctgattgcaggccagcccgacaaattcaagaagaaagtcaccacctatgacatcgaaaaatcggggctgggctttatgctttcggtgcaggacttcaaggccgacgctgactatttcaaacgcctggcggacattgccaaaggcggtctgacggtccagtcctctaccggcactatgatggaaagggtctcatcgggtgaaaacctgattggctttaacatcctcggctcttacgccgaagcacgcgccaaaacggatcctacgctcggcatcgcctatcccaaagactataccctggtgctctcaagggtgagtttcatcaccaaagacacggccaacgccaacgcggcgaaactgtggctcgactacgtgctgtccgagaaaggtcagaacattttggcaaatcaggccgatatcccgtccattcgccacgatatcgacggtaaaaacgacatcgatggcatgaccaaaatgctgggcaatgccctgaaacccatccccgtcgatgaatcgctgctcgaatatctgcaacagaaaaaacgtctggactacatcaaacagtggcgtgaagccgcggcaaaataagggcgtttacaccgatgacccaggctttcttctcaagcaggagagagccttaactcgctgacttataaaaatgatagggactcctgcatgcgtagttatcttcggaagtggcagagcctgccccgcagcgtcgtcgtggtcataaccgcgttggttatctatgtgccgctgtcgtttatcgtgattcagagtttcctctcagcaccgttcttctcccctccaaagtcttcagcctggaatcgttcgaatttatttttaccgatcccgatttttacaaggcgctgaaaagcggatttattctggccttcggcctggtggttatcgccatcccgctcggcgggatcctggcgtttttgatggtcagaaccgacctaccgggccgacgatttatcgagccgctgattctggtgcctatctttgtttcaccgatggtgctgggattcgggtatgtggtagcggcaggcccggtcggattcttctcgctgtgggccgagtcgctgtttggcttcgtaccgtggaatatctatgcgatgtcgagcatcgtggtgattgccggactcacccacgttcctcacgcctacctctatatttcctcggcgctgcgcagcgtcgggtctgacgtcgaggaggcagcgcggatcgccggtgcttccccgctccaggtcatgactgctgtaagcctgccgatggtacgtccgtcgattctctacgcctgcgtgctgctatttttcctcgggctggaggtctttgggctgatgctggtcctgggagaccccgagggtaatctggtgctggcaacctacctgtatcagctcaccaataagctgggcacgccttcgtatcatctgatggccgccgtcgcggtggtgcttattggcatcacgattcccctggtgatgctgcaacgccgcctgatgcgcaccgctaaccgctttgtgaccatgaaaggcaaagcctcgcaggcacgcgccctgccgctgggaaaatggcgctgggtcgcaggcgcggtggtcgttttctggctcactatcaccatcggcgttcctttggtcggcgtggtgctgcgcgcgtttatttccaactggggcgtcggcgtgtcgatttgggacgagatgtcactcaacaccttccgcactatctggcagcagcccaacctgctgcgggcgattgtcaactcgatggccatcggcgttatcggcggcgcgttggcggtggtgtgttatctgtttatcggaattgcgatgcaccgtaaaccggacggggcgacccgctttcttgactacagcgttctagtcccacgggcggtgccggggctgctggcggggttagcgtttctgtgggtcttcctgttcctgccgatgtggctggacaggtcgcttaaagacggctggctatcggttctgccgttcgccgatgggttgcgcgagcatttcattgtctggctgcggcaactgcgcagcaccatcttcagcgtgtggttagcctacacggtggtatggatggcctacggactgcggttaatctcctccaccctgctacaggttgcgccggagctggaagaggccgcacgcagcacgggcgcgacgcgcggacagataacccgccacgtgactatccccctttcacgctatgggttgatcggttcctggctactgatgttcctgattttcgaacgcgaatattccaccggtatttacctgctttcgccgggtaccgagactatcggttcgatgctggtatcgctgtgggcggcgggggcaatcgatattgttgccgcgctgtcttttatcaatattctgctggtggtgctcggtttggggattgccctgcgatttggagttaaattacatgattgaactgacggtcgaagatctgcatttaacctatggcgacaatccggtgttgaaaggcgtgtcaatgacgctgcgtcgcggtgaggtggtctccctgttgggcccttccggcagcggaaaaacaacgctgctgcgggccgtcgccggacttgaaaagccgactcaggggaaaatagtcattggccagaataccgtttatgccgggacgccgcgtagcgaaatcccggccgaggagcgcaatctcggtctggtatttcagtcctacgcgctgtggccgcacaagacggtgttcgagaatgttgcttatccgctgaaactgcgcaatacggcgtcggcggagtgtaaacagcgggtgcaggcggtgcttgaccagcttgggctcggtcatcttggcaatcggcatccgcatcagctttccggtgggcagcaacagcgggtagcgattggtcgcgcgctggtctataacccgccggttattctgctcgatgaaccgctgtcgaatctcgatgccaaactacgcgaggaggccagggtatttctgcgcgaactgattattaaactcggcctgtcggcgctgatggtgacgcacgatcagaatgaggcgatggccatctccgaccgcattttgctgctcaacaacggcaagatagagcaagagggcacgcctcaggagatgtatggctcccccgctaccctatttaccgccgagtttatgggcagcaataatcggctgcacggtaaagtcaccgagatccgcgacggcatggccaggattgaaggcaaagactggacattatggggtaaagcggcgcagagcctccaggcgggagcggaaggaaccgcggttatccgcgtcgagcgagtgcgaataaccgaccagcagcaggataatcagctcgagctcgctctcctgaccagcatgtatcttggcgatcgttgggaatatctgttccgtacccaggccgacgattttgtcattcgagcctatggttcggatacccgagaagccgcgctttgtcgcctgaccctgccggctaacgatgtctggatattccccaaagcctaaatgataaaggcatgagcccggaagggtctcatgccttttattaaccgtcacatcaactcagcttttaccgcgagctgtttatccccccgccttaccaaaggaaatagcggttttgcgaatgataaataatccggctgctctcggtgatattgctcgcgtatctgtccgccattgagacataaatcgccgcaacggaaagaacaaaggcaatcgccaatggccagaaataggccttagggttcgaatagttaaatttgaatgcgtaggccagcatcgccagtgggataaggaagtaacgcccctgcacgcctgcaacttcaaccgccgggaacggtgaccactgtgccagcagtgcgaggaaaattaggaacacggcggcgatggtgatcaggataataaaccacgccgtccatttctcgctgaccactctgtccttcacgaaggttttcagaatcatgaaaataatgaaaacggcgaaaataaccgtgaattcaattctgatggtcgagtccagcacccccagtaaaccaataaaggtgatgaaataggtggcgaccagcttcgcatcggtcagcgtatggactaataccttaatcacttccagcggatgagaaatgtagtacttgataacgtccgtggcctcgacgccgggatgcagcgtgaccaccgtattgtgcgtggtctttaaggcaaacaccgtccagcccaacaccgcaaccgtggtaaccacaaaccagaccagattgatttttcgtttgttgaggccgaaaagccagagcggcaacagcacaaatggcagcaggttagcgcgcgatcccgccaggaagaatataaaaatgctcattaacgtcacgagcgagttgtatttttccgagacaggatttttcaccagattcatgaaaatcgacatcgtcaggatagcgaagctaatgctaagtccgtctatcgtcggcgagaaaagttgatacagcgacatcggcaaaataagcgttgccaatgccaaaggcggtatcgggtagattctccaggccaacagtataatcaacaacgaaaccgtaaaggtcaccgtcgaggcaaagaaataggtctgataaaacgtcagtccggccttttctgcaatcgctatcgtcaccgcctgcggcgtataaaccgcggggaaataataggcaacgttaggcattgcataaaatgcgttgctgcccgtaaaggtcagatcctgaagcttattgacgtagtttgaaaagtcttgcggattaaacgagttttcgatggctttctcagccgcaccagcctcgatgatggcattatctatctcgccgcccgaattaggctgtccgactaaagtgaaatatccatttgccagcgcggcgctgcgcgagaagtgatttacctcatccggtgaggtcagcggcggctttttgttaaataccaaaaaaaatgatgaatatataatcagcagcgcgagtggaaaaataagtagcttactttctctcttcatttatcaatcctttaccttaagagtgctgtttcttataaatcagttttttcgaaaaagtgaagttggtaatcatcccggccaaacttcctacagcgacgcccagaataggatactcgcgcacaagaatgctcgagttcaccatcagcacataacagccaatattgatacagcccccaccagcatcaccagaaaatagagagcaaactctttgcttctcctgtgggtgacctttgattttgcgaaggtaatgcttctattcagtaaccacgtagcaatcactgcacagatgaaagaaatcacccgcgcaaaataaagaccgagtgagtccttcaacaaatagagcacgccggcgtcgacgagaaacccgataccgccgatcaccccgaatttaaagatttctaaaatcgtgcttttcatcgcggttcatgggtattagtggtggataaatagaacagacgcttgctctcttgtcttccgatggtgacgttatcaaggattaagccgcaggctaacgacaggaaagaggccagcatcagcatggcagaaagcaaggcggtaggcagtcttggtaccagtcctgtctgcatgtagacgtagaaaacgggaagagaaagcagaatagaaaccacaaagaagcaggctgcaatcagtccgaagaagataagcggcttctcgcgcataaacagcctgacgatggtgccaagtattctaaaaccgtcgcgataggtcgaaagcttactctcggaaccttcagggcgctcgccgtaggcggtagacacctcaccgtagggcatgcgcagttcaagggcatgtacggtaagttcagtttcggtttcaaagccctgtgaaagcgccgggaaggatttggcgtaacggcgggtaaaggcgcgatagccggagagcatgtcggtaaatttaccgccgaagattttagtgacgctctgtgtcagaaccttattacctagctggtgcccagggcgataagctttatcggcaatatcggcagtgaccttgcggcagccaacaaccatatccagacgatcgtcaatcagtttatcaaccagcttatgcactgccgccgcttcataggtggcatcaccgtcaaccatgacgtaaatatcggcattcacgtcggcaaatatgcgtcttacaacgtttcctttacccttttcattaacagaaataaccgttgcccccgcttgaagagccacctctttggttttatctgtcgataagttatcaaagacataaatagcaatctcgggcatggcatttttaaaatcagtgacgacttgctcgatggtttgagcttcattatgacatggtatgactagagcaatgcttttatctctatatttcatattttcaccggatttgttgcctgtttgattgatagtgggaagaatgcatggcgtcttttttttcttgtttttcaacgcgagggcgattcactctaaaactttgcatgatagttgtaaagattttaactgacaaagccaaattatgtgaaaaactttgtatttacccccataaaacatgacattggaatcaatgcactagactaataatttactttcagcaagttattaatgagttattttttgaagggaataacgaccgtgaagaggcagagggtattcccctgaggatgaccggtaaaggttgccagaggaaggatttagtttaaaagattgaaatattatataataaaaaaaataccctccttccggagggtatgaataatgatttagcagttgatcaacgctctctttcaccatcaatcacggtgagtgatggtcagagttttcatgattacggtctagtcactagtactaatacccaataaagtttcaactctgccagcagtagcggtaagaacagctgcggaacttgacattatcacctggcctgtaaatatcgccctgccctgagagttggtcaataccgtttttttatcgagggatataacaggaattgaatacctaacagttacctccttatttttaatcaccttaccggtcttgtctttcactatagcggtcagtgttatgttatcgcctaccttgtaattttccttgtcagacgtaaattcgattgaagcagcctctgccacagtagcggcagtgaaggtaagcgttttattcttagaagatttgtttcccgattttgcgcgcaatataaaatctcccaccttctggctggtgatagtggcggtcgctataccgtcgatatcggtgcgcgtgacatcagttatatcaagctcattgcctgtaaagtcaacaacttcatctttcagaggcgagccgttggcatccctaaccgttaccgaagcgacaatgggttgctctacctccacgagggttaaatccgttgttaaatcgaccactgcaaccgcagctccagcctcggtgaaacgaagttccttactcaatacggtgccagagccaacttgtgcggttgccgtaaacttacctgcggtttgactggtcatctgtgcgacagcttgcccattagcatcggttgttttttcaccagcgccatcaagccccgtaccaccgaagctgaccgtggcattttccactgctttgccgtttttatcgtgaaccgtcgcggtcagctgaatgttcatgcctactagcgtgcctattgcgttcgcatcaagctgcactacattgttagcttcgactacgactgcctgcagtgttagcggggtttcaaataacgtcgcgccgcccagtgaggaaacgagcaccacctcgccagccgtcgaacctgccgtaacgtcggccgtataagttcccgctgttgacgactcggtaaacttcgtgaaagtcacaagctcacccgcacgggtagtggatttgattttcagctgaagtttatcagccacccctttaaccgggttcttgtctttgtcggccagcattagcgtgattttagtggcagaagtcccgtttgccggcaatatcgattccgccataaccgctgacgaattgccaatatcagcctcttcatgaaccactatcttggcctgcatcgggctggactcgccgccacgggtgtcaattgcggttgcggtaagcaggtaggtattattggtcgcactattataagcaggcagttgaaccgcggcgtccttcgctagcggattgatgattgtgcctcctgccttaaccagttcgtccgcaacgatgcgcatcttctcaaagccgtgcgttgaggaaacctctatctcaagaggtatgacttgaccggctttaccttcgagggaacgcgccatcgacagcttaatcagcgtctgtttacggtaatcgagcacgatacgattattacgtgaaacgaggtcataacggcctccctgcaggcttcgcatagccgctacctgtgacggatcgagcattgcggccagagaacgactgaaatcatagttgagcatcagcctgacaatattgtctgccttaccactcgttatcgagcgatgttcaccttcaagggtgaccaacggaatcggggtccagttaactgacgcactcaccgccgaggggtcgctctgcacctcgctgtgattaattaacgccacattttgaccgtaatattgttcgtatttcagcttaccgccaatctgtggataggcagggatccagctctgagcctcaatgtcccagccgttagcagggcgctcctcgaggtcagtgccgtcgcgagactgatgccattcggtgagtcgcagatagccattggcagaaagacgcaggttgtcggtccaccactcggcaccgataccccagcggcggtttttgccggtcatgtcgttatcaagaaacacgttggaacccaacatccaggcgtcggcaaaatagcgcgtaccgagcccgaggttgagcgtctggcgcgagtcaatgcgacgcaggcccaactgggtaaaaaatagattctccgctttattgtcatacagcgggacaagaacatcgcccgctatttcagatgtcgatgaacctaaccccgttccaagcgttatacgtgaagaaccacccagcttatttagccagctttctgcctgctgcccggcagcctgacttgccaggctcgaagcataaccggtcgccactttgtctgccgagattggattacgtccgtcaaactgactacctgccgccgtaagatgttttgcggcaaggttagcggtattatcagaggatgcaggcaccgcgccagtggccggacccggcaaataaatcagggtaccgacgggagcagcaagcaatgcattacgggaattaaaggcaaaggaattaatatcccatacctgatcaatttgcagtttattatttttaagcagtgaagccgtggtttccccgactgcaacctatagccatgtaccagtttgctgcccgagtctattacgccggccctggcctgggcgcgatcggttgaagcattcgcctgttggcttaatgccaagggcaacataacctgcaaagagatttgcgaccaaactaaaaacgctcgacgttttggaaagattactttcataaattaaaagtccttttaatttttattattaatttaatctgaggctcgaaaatccgtaaatcattaataagccaaagattaacgagtccatgttatttactttacctaaatcaaaaaatagagtgcgcgtcagaaaaaatgcacacggcagcataatgcttaatagttcacgccaaggaaagttatttcattaacattaaaaattaacaaataaataacgtaaaaagtgatagtaaaaattaataatttaaaattaagccgaaaaaataatcaatatccctttattattttcagcaatcagcgaaaatagattgatattaacttttcggtaaaatcgggggggggtaaatacgacgaacatttattgtcatacaatctgacagttttcgccaggcttgtgcctttccagcttatcaccgtactgctataacttttaggaaatccattcccctatctcagagaaaatatcatgaccctgcgctgcgttattcttgacgattaccaaaatgttgcgttatctcaggccgactggtcagcgctcagccccaaggttgaaacgctggcgttgcataatccccttcacgggattgaaaagcaggtcgaggcgctgtttgatgcagatattgtcgtgatcatgcgtgaacgtacgccctttacagcagaactgttggctaagctgccaaacttaaagctgctggtcacctccggcatgcgcaatgctgccatcgatttggccgccgccacggcgcaaggcgtcacggtttgcggtaccggcagcgggtcgacggctcccatggagctcacctgggcattgatccttggattggcgcgccatgtcagcgtcgaaaaccgctcaatacgcaatagcggcccctggcaaagcacgctgggcgtcggactgcacggcaaaacattgggattgatcggcctcggcaagattgggcagaaaatggcggttattgcacaggcttttggcatgaaggttatcgcctggagccaaaatcttaccgccgaacgtgcagcagagttcaacgttgaattagccgaatcgaaacgggtactgctggaaaatagcgatttcgtttctctgcatctggtgctcagcgatcgcagcagagggatccttggcgctgaagatttcgcggcgatgaagcgcagtgctttccttgttaatacctcgcgtgctggattggtggatcaggatgcgttgctcgacgcgctaaacacccagcggatagccggggctgggctcgacgtgtttagccaggagccgctaccggacaatcatccttatcgtcacctgcctaacgtgctggcgacaccgcatctgggttatgtctccgacgacaactataaaatttactttaacgaggccgttgaggacattcaggcgtttattgccgggcaaccggtcagagttttgggttaagtaaaactgcctcaactcatcaaaaatatttgagctcgacacaaatattattcgcttttcatcaacgttttgatgggtgaagattgagttctgtgaactccatcactcacccatgagacgccgatgaaccctgctcatcctgaacaaaaactggcggcacgcctgtcgtcagtcaccccctccgtcacgctggtgatttcgcagctggcgcgtcgcctggcttcgcaagggcgtgacatcatcaatatgagttcaggtgagctggattttgatactccgcagcatattcaggacagcgctttcacggcgatgcaggctggtcagacgcgctataccgacgtcggcggcaccgcagagctcaaggcctcgattatcgaaaagtttgcgcgagacaatcacctcgcttactccgccaaacaaatcatcgccagcaccggtgcaaaacagataatcttcaacgcctttttggcaacgctcgacgctggcgacgaggtcatcctaaatgcgccctactgggtgtcttatcctgacatgatacgtctgaccggtgccgagccggtcgctgtagtccccgcaccgcatgaaggtttcaagctgacgcctgcgagccttgccgcagcattaacgcctcatacgcgctggctgctgctcaactcgccgggtaacccgagcggggcactttattccaccgatgagctgcgtgcgctggccgaggtgctgaaagattatccgcgtgtgctggtgatgtccgacgacatttatgaacacattgtctatgaaggggagtttgtctccttcgccactgccgtccccgagatggccgatcgcaccctgaccgtcaacggcgtatccaaaacttacgccatgaccggctggcgtctgggtttcgcaggcggccccgagtggcttatcgccgcactggcgatgttgcagtctcaaagcacctcctgccctaatgcgattgctcaggctgcggccattgccgcacttgatggcccacagcatttgctcgccgaatggtgccaccgtttacgccgccgtcgcgacagcgcgctgaacattttgcgccagtcgcctgacctgtcggtcgagacgccccttcagccttctacctgtttgtcggctgtgaaaagctgctcggcaagacgacgccgacgggcaagacactgaacagtgacctcgacgtagcggaatattttctcgaacacgggggcgttgccgtcgttcccggcacggcattcggcatggcgccgtattttcgtctggcctacagcatcgccgatgaagacgttaatcgcgcctgtcagttgatggtcaacgcctgtgaggccctgctttgatgaacagcattgaaccggatttcgccctggcggcagagctgtttgaaaaactgcgtcgctcaagctttgacggcgtgggcataacccgtgactcatacggcaagggcgagcagcgggcgcacgacctgctggctcacaccgccgaaacattgggtctcagcctctcgcgcgacgcggcgctgaacctatatatgaccctgccggggcgcaatcctcacgcaccgccggttatcaccggatcgcacctcgactcggtcccgcgcggcggaaatttcgacggtgcagccggtgtcctggccggtattgcggtgcttgcaggttgggtgcgagccggttttcagcccgacgtgagcgtgacggtgatggccatccgcgccgaagagagcgcctggtttcccctctcctatctcggcagtaaagcggcatttggactgataaacgccggcaatctcgagacccgacgcgccgacaacgcccgaaccctggcagaacaccttcaggacttgggcggcgacggccaacgcttgctggtcagtgaaccgaggctcagcgccgccaacgtgaacagctttatcgaactacacatcgaacagggtccgattcttgaggatgccggtcagccgctgggaattgtgaccggcatttgcggtagcctgcgctatcgtcaggcccgcgtttatggtcagtatgcacactcaggagccacgccgcgcctacatcgtcacgatgccgtcgtcgcagtggccgagctgataaccgggttgtatcaggactgggccatactcgaggagcaaggccaccagcttacagtcaccagcggccagttatcaacggacgcacagcaggcagatttcagcaagataagcggcgatgtgaagttttgcgttgattttcgctcaagcagtgtggaaacgctggcactcatcgaccagcatcttcaccaaaggatagcgcagataacggcacgtcacggcgtgagcttcgaattgggtgagcaaacgcgcagcgcaccggccaagatggacaccaagctgcaacggctgctgcataacgcggctcgcgcgctgtcaatcccggccatgacactgcaaagcggagccgggcacgacgccgcactgttttcgacccagggcgtgccgagcgcgatggtgtttgttcgcaacgccaacgggagccacaatcccgacgaaagcatggcgctcgacgactttgccgccgccgtacgcgtgctggacgaagcgttacgcaaccgcagcctcaccgccgtcgaaaggtgaagtgtttacagctggctcaatcgacgcacaatgctctcacgcacgttgtcgatgtgtctggccgccgcggcccttgcgccgtcggcatcaccgctgcgcagggcggcgataatctcgagatgctcatgatggccgctgacaaagcgctcgggcacctgacgcaggttaaacatccgggttttcaggcgcaggctctcaatgtactgcgtcagaagctggttgccgctgtagtgcgccagcgcgttatgcagacgactgtcaatctcccagtcctcctggggctaggcgtttcgtcggccaacagcttgttgatccccgcttcaatggcgtcgagctcggacaccggtacgcgccctgccgcgagactggccgcctctgactccagcgtgcgcctgacgtgcagcgtctctattagctcacgaattgaaaactcttttaccaccggcgttcgtcccccggcgcgaataataaaaccttcgttttccagtcggttaagcgcatcgcgcaccggcgtgcgtgaaatattcagcagttccgccaatcgcctttcctgcagcaccgtatttaccggcagctcccggtttatcagcatattcagcagcacttcataggccttggtgctgagattctgctcgcgttcaccaatcaaatcagcaggtcttttgatggaatccatggtgtcatttcacattaacaagactgataaaaaaggcaggcacggaggcctgccatgctttaactcacgcttcgggcgttactgaggcagcgtgcgtaccgggtctttcggcgccggatcgaagcccacaatcggggtcacgagtttagcataggtgccatcggccttcatatccgccagcgccttgtttaccgcagcgaccaggtttggttttccttttttgaaggcgaaacctttctgaataacgctcacatagtcaggcgtttgcgttaacggcagatgcatatccttgatcagataagcgttgccgatcgagtcgttgatcacgccatcgatattgccgttcgccagatcctgcaccgccgccgtcacgtcgatatagttcttgagcgtcgcgccgtggtcgatagccaactgggcataagttgaagaaacctgcgcaccgatgcgtttgcctttcaggtctttggccgacttgatgtctgattttggtggaataatgatgcggccaccggactctatccagccgtcggagaagacgatagccttctgacgtgcgggtgtaatgtccatcgccgcactgctcatatcaaactgattggcctgcaggccgaccagaatagagtcccatttggtgataaccggcacgtattcgagatgtaaacggcgcgcaacctctttcatcacgcggatctccagaccgtcgagctggccgttagcgctacgcatgctgaacggcggatccgtgccttcggttgccacgctcagtttgcccggagtgagcagctcaagtttcccgtcagcatcggctgccgtagctaagaaaggcgtcgccatggcagcaagaacggtggcaatacttagaaaatgcttaattttcatgatgtcactctctggtaatagatgaaggaaataccctgtgtgttgcaaaaatcgtcatgctgtaacgcgcgcacttatgccgcgcgttcactggccagcaaggctaaaagctcggccattaccgttgccccgagcaacgaggtaatttggcctggcccgtcatacattgggctgatttcggtcacgtcacagcccaccatgttgatgcccttcagggcacgcagtaacagcagtgcctcgcgagcgctcggccccccggcctccggcgtctgcacacccggtgcgaaagcaggatcgacaaagtccatatcaaaggtgataaaggtcgggcgaccggctgtgcgctcggcgatgcgctgcgccatctgtttaatccctaattcgaacatctggtcggtggtaaacacctcgtaacccaggtcgagcgactgggtaatgtcggaggtgcggaacagcgatccacgaagcccaacctgaatggaatacgcaggatcgacgatgtcctcttccaccgcacggcgaaacggcgtgcctgcgctgtagcgtttatcggcgaaatatttgtcccaggtatcgctgtgcgaatcgaactgcaccagggccagcggcccatggactttggcgacggcgcgcagctcggccagggtaatcgagtggtcaccgccgataccgcacggcacgaccccgcgctcgacagggcatacaccgcttgctcaatgcgcgccaggcactcctcctcgtagcccggcaccaccggcgcatcgcccgcatcggcgcagcgaagggtatcgaacacgttgatatcattacgataagggttgatcggccgcagcatggtagacatcgccctgaccgcattgggcccgaaacgcgccccggtgcgaaacggtgcgcccgagtctgacggcagaccaataatcgccgcatcaagctggctcaaatcggtcgccatcggcaggcgcataaaggtcggcacgccgcaaaagcgcggagtttccagcgagtcggtgggtaaaacactcataaatcactccgtatgaattagctaaaacgggcctggcgacgttcaagccagtcggaaagctcggtaagcagcgtggtgagcagcaggtaaatcagcgctgctgcgatatagaactggaacggtcgaaaggtggcggaaataatggtctgtgcgtacagcgtgatatccaccaccgtgatggttgacagcagcgaggtgttcttcagcgtcgaaatcgcctcgttggtcagcggaggcagcacgacgcgaaacacctgcggcaggacaatgcggcgcatgatttcacccttgctcatgccgagcgccgaggcggactccatctggctgcgcggaatcgcctttaggccagagcggatgatttcggccacgtaggcccgctgttcaatgccaatgccagcactccggcgacaaacggcgacagatggatgccaatttgcgggaaaccgaaatagaccacaaacacctgaataagcgcaggcgtaccgcgaataaaccagatatagaaacgccccataccgcgaaacagcctcactttggaggtcttggcgctcacggccataaagccaaacacccagctcagaatgatggtcgaaatggtgatcagcagaacggtccacgatgcttcgagaaatcccatgccgtaggtgttgatgtcatcccaaagttggttcatgggtgattctcctgcttgcttttaaaatcatcatgcaaaatacggctgaggaactggcgcaaacgcgggctctcaggatggtgtaaaaccttgctcggtgcgccgtcttccgccattaccccttgatcgaaaaacaccacgcgggaggagacgtcgcgggcaaaggcgatttcgtgggtcaccagcagcatggtcatcccttcttcggccaatgatgccatcagagacagcacctcgcccaccagctcggggtcgagcgccgaggtgacttcatcaaacagcatcagctgcggcttcattgccagcgcgcgggcgatggccacacgctgctgctggccgccggagagcttcgccggatactgatgacgcttctcatacaacccgacgcggctgagcagactttcggccagctcgatagcctgtttacgcggcattttttttacccgcagcggggcttcaatgacattttcgagcaccgtcatgtgtggccacaggttgtagctctgaaacaccatcccgatgcgtgcgcgcagcaggcgcagctgctcttcggtcggctgagcgcgagcaccgtctcgaaaatcgaaggcgaattcgtcaaagttcatgaagccgctctgcggcatttccatcacgttgaggcaacgcaagaaggtacttttacccgaaccactggcaccgataatcgacaccacttcgcccttgtgaacgtccagcgccacgtttttgagcacgtgcaggtcaccgtagctcttgtttaactctttaatcgtcaataaaggggcagatgcttcactcatttggcctcctccggcacgcttttcgcattgtcgtcagagacgtcgagcccaatatcggccggctggcgcgatgcgccgttaattggcgtaatgtcctgtgggcacgcggagagcaccacgtagatatcggcctcggcgcgcagttgcagcacgtcaccggcgacggagcgcggcggcacgcggtctagttcgcccgcttcggtaatcggcacgttcataaacaggttgagcgaggctggagtaaaaggcagcgtgatgcccttctcgctcagcgcctcatggaaattatcggtgcagctgcggtgatacgtctcacaacccaactcgcgataaattgcggcattacaggggcagagcagtgtgtcgtgacgccccggggtggtatcagcggtcagggtaaacataggacgacgatagatgctcaccaccggcatgttcagcgcgtaaaacaggttgctgttaaccgaacgtgtatgttccatagatgaatattcaaaggggtcagactgcatcacagcccaagtatcaacaacttgatttccctggagattggtaatgctcagccgctgacctttctgtaaggctacagcggtccctcgcgtggcatccaatacaaaactggacagagatgagtcgtttttggcggtcatacaattcctctcgctataaaaaatgactgctgctatttttggtattccaaattggaattcttttggtatacacaagaaatgcaattaaaatgccaagccgacttattcatcaaaaaagagtgaaataatgagcagacgattttgcctcatccccagccgatccatgaaagcggcgtcaggcaactcagggaaaacgggatcgaacctttggtaggcgaagcggcctgcgagagcgcaccgatcgaagacgtggtggcggccatctaccgcagcggtcaattttcacgcaccaggatggtgcaattgcctaatttacgggcaatcgcggtccacggcgtcggcatcgacggtatcgatttgccaggggccaatgaattaggcattgcggtatttaatacgccaggggctaacaaccgttcggtcgccgagcacgcgattgcgctaatgtttgccttgaccaagcggatcccagagtcggatcgtgccgtccgtgaaggcaatttttcatttagatttgagggcggactgcgtgagttgttgggtgccaggctgggcgtcattggcttcggcgcgattggtcagttgacggccaaactggcgcttggcatgggcatgcaggtacagatattatcccgccgcagcgaggaagagttggcagcgctgggcctgcagaaggcgcacagcctcgagagtctgcttgccacaagcgatgtggtgtctctgcacgctccgtcgttacctgaaacccagcatatgattggcgccgaacagttaaagacaatgaagccgtcggcctttctgattaacaccagccgcggggcgttggtcgatgaagccgcgctcattaccgcgttgcaaacgggacaaatcgccggggccggtctcgatgtcttcgcggttgaacccctgcccgcctccagcccgctgacgcagctatcgaacgtgattttaaccccgcacgccgccgcgtcggccgaacaggcgttgatgcgtatggcgagcgcggcggtcagcggcgtgctcgatattctcgacgatcgcgcgccagcctcattaattaacccgcaaatctgggagacgcgccgccgctaagagcttgcgtcaggcaatcacttttgccatcgacgccagcgtcagaccattgccttcgagcagcgttcgcagctggcgtgccatctcgaccgcaccgggcgtgtcgccatgtacgcagatactgtcgatacgcgtcggcaattttttgccatcgagcgtgataatcgcccggctctcgagcatttgcatcacgcgggtagcggcctgctgtgggtcatgaatcaccgccccggcagtttgcgtgacaccagcgcccccgtctcggtataggcgcgatcggcgtagatctcgcgcaccaaacgcagaccgattttctcggcggccttctcggtttccatgcctggcatcaccaccatgataagcgagggatcgacgctgtgaatcgccttcgctaccgccatagccagctggggatcttccgccgccatgttgcccatcgcgccgtgggttttcacgtgctggagcggataccccatactctctgccaacgctttcagggcaccaatctgatagacaatctgtcgctcaatctgtgccggagactcaccgaggatctgacggcgaccaaagccctgaatatccataaagcttggatgcgcgcccgcgccaacgccgttggctttagcagcgctcagcgtcttgaacatcacgtcagggtctccggcgtgaaatccacaggcaatattggcggaggtcactatctcgagcatctcgtcgtcttcgcccatcttccaggcaccgaaactctcgcccatatcgctgttaaggtcgatcaacatttttcacgtctcctgatgaatgcatcattggcaccgttcttgcgtcaccgttcctacgtttagtcagcaaggcgatgagttagaaaatctatgcaagagtacggccagttttgagccggtgtcttgacagtacttttttggtatgccaaaagtattccacaataaaaataatttaagaagatttttgatcggggaaaaacaagtgaatgaaacgcagatcccgtggcggatcctaccgatcgccgaccaggcggtgtacgtcgattttggcgacgtcattgatgagagcattaatgcgcgcgtgaccgccctggcgtctcgcgttcgacacggcaatatcgtgggcgtgacctcgctggtaccgacctatcgcgcgctgacggtcggctacgattcgaccaaaacgcagcagaccagactgatagcgacgttgaccgagctactgtctcagccggacgacgaagcagagccggtaaggctgtggaccattccggtcaactatggcggtgaacagggtatcgacctggcgtggctggcgcagtcgcatgggctgagccaggaagaggtgattgaacgccacgtcgcggtgtcgtatcgcgtatacatgatggggtttatgccaggattcgcctacctcggcggcctggatcctctcctgcatacctcgcgccgcgagtctccgcgtttaaaagttccggcgggcagtatcagcatcggcggcatgcagacggcggtaggctcggttgaggcacccagcggttggcatctgatcggccgaacgccggtacgcagcttcgatcctgaacgcgccgagcctttcctgtttcgagccggtgaccgcattcgcttcgctcccatctgcgttgaggaatacgtgcatctcctggcacaggctgactttttacccgagtggaggtggcaatgatcaacggcttcgaggtgttatctcccggtttatacaccaccctgcaagacctggggcgttttggttttgaggactgtggcgtgccgccttcgggcgcgatggacgagatgagctttgccatcgccaacgcgctggtcggcaatgacccggctaccggcgcgctggagtttacgctgaccggtgcaacgctgcgactgacgggcagtcagccgtgttcttttgcggtcaccggcgatgtggcgatgaccctcgacggcgtggcggtcgcgccctatcgtcgcctgacgctcttgcccggcaaccagctgcgcattacccgcacactcagcggcgcacgcgggtatctcgcggtggccggtggcttcgacgtcaagccggttatgggcagcgtctcgaccctgatgcgcgcagggttgggcggcttcaacggccgacagctgcaaaaaggcgattggctaccgctcgcccctgccccacaccgcactattctcgatacgggagaaccggaacagcggctcatgccgcagcgcgaacgccgtcctattcgcgtcatcgccgggcctcaggacgatcattttgacgcacaggcgctgcgtgaatttttgagcaatgagtatcgtgtcagcgagcagagcgatcgtatgggttatcggcttagcggtccgccgattgcacacagcaaaggcttcaatattgtttccgacgctatctcacgcggcagcattcaaatacctggtaacggccagccgatcgtcgccatgaacgacaggcaaaccaccggcggctatccgaagattgccaccgtggtgcgcgccgatctggcacgcctgggtcaggctaaacccggtgatcggctccgctttgagaccgtcagcgtcgataaggctgagttactgtgggccggtcgccaggcgttgttagacgcatggctgaataaggtcaggcgcgccgctcagcccgcctaatgctgctttttatacagtaatatcgccagccatgggccgcccagcagggtagccattaacccgctgcgccagcggaccgccgactgcgcaatatttgcgagatgatgctgatttctgtgcagaataacgcgacgctcgagggtcgagcgtgaacacgattgctgaacagctgggctaccagagtccaagcgcatttatttcaatgtttaagaagtcgttgggcgaaacgccacagagatacttgaggaattaaagagagagtcacagggttttacagcaaggatgttggggagcctatagaaataaaacgcagctcccctgttctggccttcctcctgcgggcggaggaaggagaggcgtattacttggcgtcggtggctttgacttcgcccatcgccttcagcgttttcgacatttcacgacgttctttagacaggtcagcgtttttaatgatgtattcatcgacacgatcttcatagtcgctgcgcatgttggcgatgatggcctgcacgtcatcaatgctcattccttgcttgatgtagtcactcaggttgtcgagcagcagaacacgtttctggttatcgcggattttcttttcgttatcgacaatttcacgctgtagtttgtttttacgacgaaaaatacgcacaaactccagtacgtcctggaaactcggcttagtagtattatccattttcacaccttcgattaagttacacagattcatttactgactgcccgcaatcgcgaacagcctatcaggattcgggctgcgcagccacaaccggctcattcttatccatcgccatcgccatcaaatccccagagatttaagctgatcggtaacctgcatgctgagccaaacgtagccataaatctgcgcctcttggttcttaccgcggttcatcgactgcatcagctcctgtaattccaccgccgattcgttcagctgaatgctgattttaagctcatcgccaatcgaaccattgcgcaacagatagctcagtttttccaacgcatccagaatcgagcgctgggtatgacgcagcgtgcgcgcattcagcataataaaatggctttctcgcgagctccagtaggcgtcggccaatagctcgagggtgcagagcagattgcggcacagcgtctgggtagcatcaaagacttcacgcgggatgtgcgactctttgctcgaggcggcgtgcaaggcacgcatcttgatcatctgcgtcatcgcctgcttgagctttttctgcaaacgcggacgctcgagcatattgggcgacagccaggcgctgtgcagcttgttcagcgacatcagatagtccgacatctgcatccgccaatggataaaggcccgctgcggataaatgctcgagaacagcagtgccaacaatgaaccgatcagtacgtcaccgcttcgccacagcgcggtttccatatcgcccggccctgcaccgataatcacggcgagcgtcacgccaagcaaaagaccggcataagcgcgtttacccagagccagataaccgctggcgaagaccaccagtccacaccatgccagcatgacgggcagagaatagagttcgagccacagcgcaatcatcccggcaatagaaccgccgatagtgccgataatcctttccgaaacgcgctgaacgacgtttccccaaaacgaaattggccccatgaccaccaccagcgtaattaacggccacgtcgcctcaggaagatgggtgagtcgaacaaacataaaggtgagaacaaacgccaaccccatccgcagaccgtgcgtgacgcgatagttggtgtaaatgaggttatcaagtgaagagattttcttgtctagacgcacgaccggtaccgcctggttcaagccggataataatattgcgtcattttatctgagttacctccggcgatcacccggcttttatcaaggaatcctctgcttttctcagggaaacgccgggtttttagataaattgttcgcgatcgagtttcgtaccccgttgggaggacgccatgagtgaaccctctaagcaaattcctacaaccggttgaataagtagatttttcgcagaagtgttagttttctgtgatgctgtttgcagtaactttatctgttttggttattattaagctgtcatctgtaaccactgatcctgttcaggtatctgactcctcctgaaaggttcgcattttggctattcggatcgtgtcgaggtgtactatgaagtttgacaacgaagatgctttcaacctggcaaccaagtttatggaacatcacgtcgagaaaatgggggaaattaactattttgttcgatttcttgaggcctatttgaaattcgacgaatggctaaaggccgaacacccgattgaagctgccagaagcgccaagaaaacgttgaaatttacatcctgacgaccaggattcgaggctaaattaaacccgctaaggcgggttttatcgttttaaaacttactgcgcggccgaagcaggcttgcaatcagaatatacgtagccttctttggtatttcgcatcacgtagctgtcgctaaatttggcaaataccatcccatcaagcgttcttgcagagaaaatctgcccgccatcgggcgtcttaattcctttcagcatcgggctggtcaccgacgcgccattggggctaaaggtgaaactattgccgttatcaataacctgagcgttgttggcaatatgctcggactgtacatctccgcctgcggcttctgtgctgtgagtttcagtgcaaagcagaacctgagcagccgaagcggtgaacggtgccgaaagtatgagaacaattgataatatggatttttttagcataccacccccttacgattcatatgctcagagaatagcatccgcgatgcataacggaaaagccccagggagaacattagatgaacagcagagaacgccttacagccagataccgagctaaatgcgcggcagaaaataagtttacacgatacatcggcgctaaattagccggctgcaatgaacgcgtttataaggcaacgcttcctttatctgttcgcagtgactcaccttctgactcacaggaattttactctcgtccgattggcatttatccctccagaacattaaccgcaaggtaaatacacgctgcaggcgtactgcaaatgaatgtataaattacttatcgacctgttattcactctctgaaagataaacctacgcgtaatagaattattgaatcatttatctggatcggtaaaaccttgagacaaaaaggagatccatgataaaaactttaaataaattgaatataatcgacactgttaataacaaataatagaaccaaggaataatccatgtttataaagttcaccgtaaccgttgaaaatattaacggccacggattaatgcaaacgtgaacaccctgtgtggtcattattaacacagaacgcatagtaagactctcacaaccatccggcgaggattacactatcattcgccttacaggcggaacaagatatggcgttatccagaccgaagtgaagtattcacttcactcaccgtgtcctcttaattacgccacctcgttaaaaacatgaaaacaagaggtcgccaatggcgacctttttttatgtctgcggcagcaaggttcataaaatagataagaagagaagcgcatgaaaataatgattgagggtgataccgaacacgcccaccttgttgccgccagcaaagcaattgatgagcataaaaagaaatacgggactgggaataaataccctccttttacctactgcatccgctaccgcaaaaggctatttcaggttgaggtcaccaatagcaataaatatcacctggcccacgtcattacaggccaccgtgagctcaccaaagttcattacggagaaagagattaaagcgcggtttcctgctgaattttcgcaggtaaatgactatatccataagcttctcttatgctcaaaaaaacgtcaggatttcagtcaaaaatagcctcttaaaacattaagaagtcaagcgtataaatcacagaacattaacaaaagtgaagtaagcctgaaggatatagggttttatactagagaatcataaacatatgagatgtgatgggcctgcagggatggcgaaactaactttatcataaaaaataaaaaaaatttatatacgatacaagtcaatgatttaaatcaatttttagtcataattttacattaaattacaagtaccccctttactaacaaagatgaatgtgtgaaaaaaaacaacatatcaactagaattcgtttaacaaaccttaagcaaccgccgatccaaccgccgtaacagtgtaacgaaagttaactatcaaaatttcgccactgacgcgcctggaggcaactttcggcatgttgtttgaatgttagacaattaggatcatgagatagggttaaacagacgctgtgctgtggcgtaaagcttgtgcatttacgctcatcgggaaggatgtattttatacagcagaacgcctgcaaagttctttcaccagtaattaatttgttttgcaggaaaataactatctttcgacaaaacattgcttgacgaaaaaaaatttaaaaaattttgaagtcagcgctaactgcttattttagaaatgccttattccattcagcaaaatggagataaagggaaacagggaaatagctgtcccttaggtgacaggaaacgtcgtcaaagtcttttcttgaatcctggaatcagttgataaggattgttcactatccggatccaacaatatccttctgagtctgtagttaatcggatgtgtacttaattaaagaagttattgttacctgaagttactgtcactagttgttacccaaataaggagttaaagatgaacattagccaagactataatgttaccttgagaacatgggagcctgaagacgttaaaggctattcagaaatggcatcaaaccaagaagtcatgaagtttatctcatcaggaaaaccccgtaccaaagagactatcgagcaagagattgcgcgattccgtgcttctcaggaacagtatggtttttcacgttgggcagcgaccttaggcgaagaacatcgctttatgggctttgcaggcttcgagaaaaaagagtacggcattaattttggtatgcgttacgactcacagtggtggggaacgccttggccgtttattgctggtcatctggctttaagctatgcctttgataaattgggtcttgaagaagtttataccctgaccaatatcaagaacgtcaaagccatcaatatgaatatgaaataccttggccttaaaacactcgatgacggaatttttgagactgaatttggtcctcatcaacgcattatcctcacacagaaactcttccagtcagtgcgtgaaatgaacgaaggaaaaatcatcaaattagtgggatccaagcgttatagcgaaaacagaataaattgaaggctttcttgtaatgaaaaatgatgatgtgatccttctttgcgaccacgccgtgttccagggggaaaaaaagaacccgattttatgggctctttggttcccttgggcattttggttgcgttatgcagggtaaccctgctagtgatttacacagtactgattcaagcctgttccgttgaaacaaagaaaaaaagttatatcagactacttcgtttaataggtatcaaagttacctcgaacctggactatgacacagttaaaaaacacacaaacggttgcgtggtcgcggcgaatcacatcagtgttttcgaccacttccccgcgctggctatgcctttgagcacgctgatggtccatcatgttgacagcattgctggcaaggtaatgggattcttgctgtttaaaggctcgggttcagcatactggcaagttaccgatctcaaacaaatggtaaagaaattccgagaatggaaaaagtcgcccgatggcgttgcgctgtatgtaacccccgaagccaccattaacaataggcgggggctttttcgttttcgtcatgatttcctggtaagaggtcgcccggttgttccaatggcgatgactcttcgactgccttttggactgtcgccaaacccgatagactcctcgggcatagcaaaatttcttcgtttattgaccagtccgacgcttcatttcaatttggactatcttgacacgataccggcttatgtttcagaagccgaatcgggcacccccaggaatacgccgaccggattcaacaaagcatcgcccagcatttaggtatccccgccacccatgttactcgtgaagaaaaacatcaatatcgcgcagggagaaaaaaataatggatgtcatcttcgattttgacttcacgctcatgcctgaggaaagtaccgtcgaagtgttgaagcttgccttgcagccgatgcacagcgtgcagccctgatgcagagacttgctgacatcgcacctagggccctggcaggcaaagcgagtttggcggaaaacctcttcatgctacaaatggcaaggagaatcaaaagaagccacatcaaacagtatgttgagaacagccgagatcgtttgccggctgtttttcacgaattgtttagcaagctcaaacaagcgaatgccactatccatattatttcagggggttatgaggaatggattaaaccgctggcaactgaatggggcattgcgcccgagaatgttgtcggtaatcgattcctctggtggcgtaatagcgtcattggcctgcgcccttctccgctctggtcttcaaagaaaagtaagtccttcatcgttgaagagttacgtaaaaagaaaataatcactagcccggcaatgattattggggacgggactgccgacagagatgtctggagccgaggcggagtacgctggtgcgttctggctgaatactataacaatgctagcctgaaagatggcgataactgttttagggcagccacaccggaagaaatgtgccaaagcgttctggaaattgttcacaccagtaaaatccgctcggagcctgttgccgaactaaactgagtttttctctgttctttttcacacggccgcagcgcccttcgactgacgccagcgaggtaacttctggcgtcagttctgaatcaggccccaagcttgccgttaagcttcctttcccgcattcaatacgcgcggcaggttgagttcaatccaatcactcaggtgaatgacctgctcgtagacttccagcccaagcggggttaaccggtactcggtgtgcgggggcatcacgggcagcatggtgcgatgaatgaagccgtccttttcaaaagtctgtaacgtttgcgaaagcattttttcgctaataccgctgattttctttctaagttcactaaagcgcagcgtctctctatcaagagcaataagcaccaggatcccccatcggctggcaatatgctggagtatttcgcgagaaggacaatttaaatcaagtagctcacctttcctaaatggatgattcaaaacacccttttcgctcatcgccattttcctctcaataaaatcaatactaaccaaatggtaagtacttacctttatatagtgtatattctatagtgctctccgtacagagtttcgatggctatacttttatatacgcctgctgttcggcaggctatcttcggaaaatggagaacattatgattgcagttacgggtgcaacaggtcagttaggtcgtctggtagtcgaagaattactgaaaaatacgcctgcgaatgaaatcgttgcggcagtgcgcaaccccgcgaaagccgaagatctcaacgcgttgggcgtggatgttcgccaggctgactacagcaagcctgaaacattaaaaaccgcttttagcggcgtcgataaactgctgctgatttcgtcaagcgaggtgggccaacgtaccgcacagcatcaggccgtcatcgatgccgccaaacaggccggcgttaaactcatcgcttataccagcctgctcaatcttgactcgtctccgttattgcttgccaaagaacatcgcgataccgaagccgcattgaagtcgtctggcgtaccttacgtgctgctgcgtaacggctggtatacagaaaactatgccgcaagcattgcaccctcactggcccataatgcctttatcggctctgccagcgacggacgtatttcttccgctccacgtgccgattacgcgcgtgcggcggcaaaagtactactttctgaggcgcaggaaggaaaaatctacgaactggccggcgatcaaagttatacgctggcggaatttgccgctgaaatcgctcgccagtctggcaaagaagtgaattacgtcaatctgccgcaggcggactttgccgctgcactgaaaggagcaggtttaccagagggtctggctgatgttctcgcggactcagacattggggcaagtcaaggtgcactgtataatgacagccagactctgagccgtttactgggccatgcgacgggcgcttaccaggacgtgattgccaaatcactcaacgcgctttaaagcgcgtaggtcgcgaagagctagggaaccaccattcctatttcacgccttgcgtgtcgagagaagaatgctggtttccgtattataaaaatcccttcaattcgccgaatacgcccgagaatttgatcgaaaatttccaaattatctgcccctaattccaccagcaagtcccattttccattggtggtatgcagagtatgcaccgccggttctcccctcaactgctgaataatcaccgacgctttcgctccctcaaccgccacgttcatgcagacgaatacggtattgatggtaaggcatgctgcgtttatgagtaatcaggagacacaggcaagcaacgcctttcagaaacggctgaccggtatcagagacgtgcagattcaggcgcagattgccttcgacagctatgtcagggcattgagaagcgtcgatatcgatgtgcatatcgttgatgacgtcgccgagcacggcacaccggactcgctctttccaaataactggattgccacgttggaagatggaacgctttatccctttccaatggaggcttccaatcgccgccgtgagcgtcgacaggagattatcaaccggctagtcactgattttgtggtgaacaaccgcgtttacctctctgctcacgagcttaaggagcactcccttgagggcacagggtcggcagtcgtcttgcgattgtctgtctcgatgccctgccttcactggttgagcgccagcggcggcgcgcgttgcatgctgtgcgaagtgtttctgaaaaggtgtgtggctatggctgattagccgacgccgatgtttgctggttaacccaagttgtttgcggatagttcattcgagcatcttttaccctgggatgtgacgttagtaacccaatgtccatgcagaaaacgggggcatattaaatgcccccgtctggggtgttacgccgtcgaacaccctaatttattaagctggatagcctctctgccgtttaaccggacagcgatattggcagcagtctgttaaggttattgtttctgccacagagaagccaggcctggcatatgcggtgcccaatggcttgctgacaggtgaccttgcaaacaacgataaacggcaccgttatcagtcaccatatcccccggtttgtactgcttatttgacacccagctgtcaccaccaacgtcgggtactgatttagcttttactacgacagagacatcagcatggctctgcaactgtccatcacttaccttcagggtaaagactaaggtttcatctttttgcacatcaggcgtcgtaaaggttgttttcacgctgttaggatggcttaaggtgacttttttgcctgatttctgcgcccagctataggtcagagtatcgttatcaggatcgtgtgaagcggagccattgagcgtaaccttctggttgctctctactgtttgcgccgagcctgcatccgctaccggtgcattgttgccagcctgctctgcctgatgtttgatgatgatatcaaacggcgttgaattgcgttctccatcgttaaccgtcagttggaaatgcagcgtttctgtcttacctggagcaggaagagagaaaaaggccttgtcatgctgggaggttagtttgacttttgaaccgctaatttgcttccagtggaaagttaatggctgttgttctggatctgatgaagctgaaccgtctagctctacgtgactagctgcgccaacaatcacttgcgggaagcttacctttgccacaggagcctgattaacgtcgccaggtgacgcattttcagcggcgtctttcatctctaatacataatcaacctgcttatcggcttgcatattcaacgttggtgaagcaccgagcgcccatacgaagaatccgccaaaattattttccgcctgccagccagcacggtaaatattatttgcacgaggttcaacaaagcgtccattaggaccccactgatcgttaatagtattaccgagaataattttcgatttatcacccagcactttactataattttccatggcgactttatatttaaaatcagggcctgcatcataggtcattacgttaaagaaatcgaaaagacttttaccttctttaagcagagttaatacttcacccgagtgatcggttttgccgttataggaacattctgcagtgagattatccagacaactgaccggatcggcacccacgtgataagtcgtcagacttagcaacttaccgctgtttgcccctaacaacgcacgtacgcgtgttgccagtttcaacagattatgattttcttcttctgtcagacgagcctgtttttcataatcaaaatctacaccatccaagcggattgttccaacctgctgatattgaccattttttttgtaaactggaaaatcctttttcaggagtttcaccagaccttgcgcgatctgttcacggttgttctcattatgaagatctgcccacagaccttcgcctttttcacccccaaaggccagcatgagttttaaatttggattatcaaatttagcctgggtccagttgagataggccatcggtttccaataagaaccgctatcggaattaaacatgtcgtcagaacctgagatattaccttgggcatcccaggaaccaaaagcgagcagaagggtatctacttcactctttttaatcagctccggcgtcatattagcggcgccccatgaagtcaggtagcttatagtacgctggttatcggcagcatgcgaagaagcggcaaataatgaagcactgataataagggatagtgttaattttttcatcgtcggttattttcctaaaattattgaccggcgaacaatagcaaacaaatcctagagaactttggcgttctaactaagaactttcgcttatagggggatatttaaataagattaataatgtcttggcggtagttcgtttgaccggcgattgcctacggcaggggaaagaaattggagtcgcgatgaaaatgcaccagggtcctggcgggttaacgctgcgtaatgggggaagaggctctgccctgctgcgcagggcagaattcaacaagcgtcgattactcttttaagtgctttggcactggcggcgtaccgtgggtatggaaggtttcgatggtcttgagcccccatgcctgccctttcttacgctcggcttctgtccataccacggtttgccaatcgggtgccagaatcaggcgagcgcctgagtttgccagctccacgcggttgcccgcgggctcccagacataaaggaagaacgtgccctgaattgcatgcttatgtgggccggtctcaatgtgtacgccattttctaaaaagatatcggcagcacgaagaatgtcttcacgggtgtctgtcgcgtaggtgacgtgatgaagacgagcattgccgccaccatgctcttcggtacaggccaaatcgtaggttttattattgatggtaaaccagcagccgccgatgcggccgttgtccagctgaatcatctcggttactcgcgagccgaggcaaagctccataaagtttttgaattcgcttacgtctgccgccagcagattaaggtgatctaaacggcgaggagaggctccacgtccatgatagcgctgcgccaggtttttaagcgccgggcgttcactcccctcggccacatagcgcacggtgtcatagtaaatctcgaatacgtggccgaaagggtccgcaaagcggaaggcccgaccgtgcccctggtcgtcgtccacccatccaatcacttcatatttgctggcttcgacagccgcaacacggcgcatcaacgccgcttccgaggaggcacgatatgcgatatgtccaacgccggtggtgtggtggcgcgtgagtttcaaggaatggaattcgtagtcatcccaggctcgcaaccatgcatgattctcatcctgagccgaaacggtaaggccatatacattgacgaagaaatcgaggctctcttcaaatttgtccgtgtacatttcaacgtgggccagatgtgcaatgtcatagcagggttctggaagttgctgcgccataataatcttcctattgtgtaggcatacagagtgtcacactaggttaaccggcgattgtaaggcgggtctgttggcttaagtttatagaggtatgacttccatttatactgtgactgcgataacaaactgattcatcgaggtatagcacatctcaagccccgtccctataagcaataaaattatttactgttccgacccccgtagcggctgaaggcgttcaatgagtaggaaaacctccagcttatggtcgacttcggtgccaggggacttattctgccacttgaagtcccctgttaagcaggctagcctgcttatatcaaaggtaagaaatctctctatgacaggtgatatcggcaatggcattgatcccaagaaattacgcacggatggaaagcggctaccgtgagaaagcattaaaactctatccgtgggtgtgtggacgctgctcgcgagagtttgtgtattcaaacctgcgtgaattaacggttcaccacatcgatcacgatcataccaataacccggaggatggcagcaactgggaattattgtgtctgtattgtcacgatcacgaacactcgaagtacaccgaagctgaccagtatggtacaaacgtcgttgcgggagaggacgcgcaaaaagatgttgccgcggcaacctataatccctttgccgatttaaaatcgatgttgaataaaaagtagtacatccagccagttagccgctcttgaccccatgggttccacgtggatcccgtgggagagaccctcttgtaacaacgtcagtcctgcctttacagcagatcatgaacatgcctcatgtttcaatgaaattaaatcacttttcctcaatcaacgactctggcataaaatacacattattattggctgtagacaatagctagtccactgaataagaaagccataaaacaaaaaattggaaatcctgaaaaagcaagacgtaaattcaggtttcatatcagaaattaggataccagaccacgatgaataacgattttacatttacgattaagagcatttctttcgatgagaattataacccatctgaaaatacgcgtctcacgaccaactttgctaatttagccagaggggagaaacgtcaagagaatctgcgtaacgccttaacgatgattgataatcgtttcaattccctggcgcatgaaaataaccctaatggcgatcgttattctgtcgaacttgaaattatttccgttgagctgaatattgatattgaaggcaaaaggaagactttcccagctatcgaaatattgaaaacgaatattgttgataaaaaaacgcatcaacgtaccgaagggattgtagggaataatttctcctcttatgtgcgagattatgattttagtgtattactctctgagcataacaagaatcagtcgacgtttaacattccagagaactttggcgacctgcacggaaatatatttaaatgcttcgtaaattcagaggcttacaaaaagcactttagtaagcaaccggttatatgcctgagtgtttcaagtaaaaacacctatcatcagactgactatcagcaccctgtattgggcgttgaatatcagcaaaatgaactgtccttgactgaccaatatttcaataaaatggggttgcaggcgcgctattttatgccttccaatagcgtagcacctttagcgttttatttttctggtgatctcattagtgattacaccgatcttgaacttctcggtactatcagtacgatggaaactttccaaaggatttaccgacctgagatctataatgccaattccccggcaggaaaagaataccagccaaatttgaataaccaggatcatacattaactgaaattgtttatgatcgagaagaacgtagccgcttagccattgagcagggaaagtttactgaagaatacttcatcaaaccgtaccaaactattcttgaacaatggtctactcattacgctctttgattaactaaaaacacaaggtcatttattatgaaaattttgttacctacttcgactgcgggcagtttgcctaaaccttcatggcttgcacagcctgagacactttggtcaccttggaaattgcaagatgaagaactaattgatggcaaacaggatgcgctgcgtttgtgcctacaggatcagctccaggcaggtattgatatcgtcagcgatggcgagcaaacgcgtcaacattttgtgactacatttattgagcacctcagcggcgttgattttgagaaacgtgagacggtaagaattcgtaatcgttacgatgcgagtgtcccgacggtcgtgggtgcagtgagccgccaaaagcccgtttttgtggaagatgccaagtttttacgtcagcaaaccaagcaaccgattaaatgggctctgccaggtccaatgaccatgatcgacaccctgtatgatagccactacaaaagtcgcgaaaaactggcctgggaattcgccaagatccttaatcaagaagccaaagaactcgaggctgccggtgttgatatcatccaatttgatgagccagcgtttaatgtgttctttgacgaggtgaatgattggggcattgccgcgttagaacgagcagttgaaggtcttaaatgcgaaaccgctgtgcatatttgctatggctacggcattaaggccaataccgattggaaaaagacactgggacagaatggagacagtacgaagaaatcttccctaaactgcaaaaatctagcatcgatatcatttcactagagtgtcaaaactctcgcgtgccaatggatctgattgagctgattcgaggcaaaaaagttatggttggggctatcgatgtggcaacccataacattgagacaccagaagaagtcgccgatactctgcgcaaagcgctacagtttgttgatgcagacaagctctaccctagcaccaactgtggcatgaccccgttaccgcgtcgagtcgcaagaggcaagctgaatgcgttaagtttaggcgcacatattgttcgaaaagaactttcgaacaaataagcttgccaaaaagtagctcattttaaaaaagctcagtccggttggcgcgatgtgattaatcgcaccgtatccaaaatccttcaccggactgagcgtttacgcttcactcgctgtcaatcttgataacgattttacctaatgcaccacgtgaaagcggtttaaacgcctcaaccgtctcgctgaagctgaaaacctgttaaatgaccggcttaatatagccggtatccccgaactctcccctgctccctttttggttaaacactggatttaatcgaaattttaggtaatctaacgaactcatgtactagctagatggatcaaaaatgaatttttcgtcaatagaagacgttagaaatcgcatcgatcaaattgatagtgaattggttaaattgatcgcccaacgcagcgagtgcgtcaaagccgctgccgcttttaaaaccgaccacgcgtccgttcgtgctcctgaccgggtccagcaggttatcgataaagtgcgtaaacaggccaccgaagcagggcttcccgaagtcattatcgagaaggtctatcgcaccatggtaggcgcgtttatcgattatgaactcgagcaacatgacacattgcaacagaaaaaagcctgacatcgttcgtcgatattctatcgagccggtgtcaggaacctggatatcggctaaaaatagcagtgctatggacatcgcagcgaaaacgaaattagaaggccaacccgcccagaggtggtatccttacctccagaccgtcactctcagcccagcctgttttctctgattattgatcacaatggctgagaaatacgccaaccaggtgattttttaacggcatgttttacaagacaattaaattcagattaaggccttaacccgcaatgcgagacaaaagcgttcagcccactttctactcacgactattgatatctaaagttaggatgctgaaatttatgaaaattattttactaaaatcttaatctgtactcaattatgtactcaactactttttcatgacgtttaattccatgattctcacatcaatgggcaatcatcaaactcctcagtgcacacatcattgatgatatgtgtttccccaccccaggcgatcgtttccatcccctcggtcttctcatcgataagttgacctgctcctcgctgattaacacacagtaatgctgttaatagctgtggtgattcattaattccgctattcgcttacagcggactttgacgatcatagatgtccgctccgtgccaaaagcggacatctaggacattacaagcgttaggtcatatgaagacattactaacatcggggtgtactaatcaacggggagcaggtcaatttgcgagcaatgaaaaccacaatttgcccgtaaacgaagccgcttaaggcagtcagcagagtcgcaccgatatccttaagtctaactgttatttggggtgtacagtaaacttacaatcatcggctgttacatacgttattttccttaagataaaaagcacaatatcaatcagggttgcctattacccttgaccaagttttcatcaggggttcgacaaacaaagtgatctcctgaagtgctgcaacaggaaatcaacgtagaagcggatttttggtagctgttggcggtctgcgaaggtcaatatatgcaccggcttagccaatggttgaaactctgccatcaggactatcagctttccttgttgcaaatcgtctgccagcaggacctccggttgcatgataattccaagcccgtttaatgccgcacttctcaatgcttctccattgttgatagccatagcaatatttaccggcaacttgatgggcttgccctctcgctgaagtgtccattcactccctgcaacgggatgggcaaatccaagacatcgatgttgactcaattcttccggcgtcatgggttttcctgccctttctatgtatgcaggagacgcacacacgatagaacgatatgccgccagcgggcgggcaaccagcgtatttacatgctcgagttcgccgaccttaatcatgacatcgagaccttcttctgccatgtccatcgatttatcgctgagcaccaaatccattgttacatcaggccatgtcgtaagaaattgagctgtaaccggcgaaagcgcatggacgccaaaagagacagggcaacctactctcagttttccacgtggattcttgtgtaaagccaatgccagtgactcgctatctttgatatcagctaaaatccgttggcaactttggtaatactcgagaccaaaatcggtaaggctttggcgacgcgttgtacgattaagtaggcgaacgccgagatgttcctccaacgcttttatatgcagcccgaccatcgtcccactgagccgcagctcttcggcaaccgcgctaaaacttccccgttccaccacgcggacaaacaccgccatactttccagtttattcacgattatcaagccagacttgttaaagatgaaaatataccgctgtttatcaaactttgtcagcgagttttaatggaccttcacttaacaggggaacgctaaaaatgattacaaatccggaactgcgcgagcggggaatgagattgtttaacgaattgtacggtaatggtgcgggagaagaactgcgaaaggacatggcagatctgtgccccgattttactgatatatcaatcgaatgggctatgggaggcatacttgcacgccctgggctggacgccagaacgcgagagctggttgtgattgcttcttgtgtcacactgggccatacggtcccgcaattgcgggcgcatacacaggcagcgctaaatgcaggcgcaagccgcgaagaaattatcgaggctgtcttgcagctactgttttatgccggaggcgcggcggtgcgcaatgcgctggttaatatacgcgatattttaaatgcgcctttgaaaagccaagagaagatctcctgacaggattttagcattacataacttgctaaaaatgaagccgatgtcttaaagctcggggcatcagtaataatggatctgttgcagacttcaccgctttgcgggagtggggctcattatatgaaaaacgaaccgggtcgtgcagctatgagggccatcttaccgttttttcaaaagtccgtccccaaggccagatcaggctgaccagtggcgaagatatgcatcatttcctgactcagtgctgattaagtcagtcttgtagatgtccgatcttcgctcatagctgcccttgatccttcagcggacaggtcagggtcatcagcgcacattaaaatgatcaaggaatctttgtttcggggtcagttttagtaaccactacagttttttgctcataaagacggtcgttccacctttaaacggttcacgtctatcgatttcatatccgagcgccgtatataatgcgatgttcgcctcgaacgcctcgttcgtctgcaggcgaatttccccaagctccgcttgagctgccttactttcaacatgtgccagcaatgtacggccgattccgattccttgccggtggggatgtaccgcaacattttcgatccaaagatgttcggcctggagccatatttcgatcaggccgaccacttcccctgcgacaatggcgaggtcaatgtcatgctcacggatggccttattaaaatcggccgtcatcggagtcggttcacgaccaatgaccggaatccatttggaataggccgcgcgcactatctcacgcaacaattccgcttcattttcttccgctcggcgaaccgaaagggcgacgtcaagcgatttgctcatataaactccttgaagctcggctaccactaacatgtgcaacatagcaggctttgcagtttttcgacgaattaacaccagattggcaccaccagtttgacgttgcaactgccagattactgacactggataaaataaccaaagtgtacagttggaggagaaatgaggtaagaaggcgtgctagcggcctagctttaaggattgactcgatagttgggatctccccgttatcatcaaattcaacaggtatgaaagtctctacatcgctctcagcagaccttcagcgtcacgtgtttgtctgctgtgtgccagaagcggacattcatgacatcaatccttgttaatcgacgtggtgcggcaatagccattatttagttaatctgaattatggacattcatgtctgaaaccttaaaaatcgtaaatctatggcttacattcttaggcagaaaaaatatatgagcgaaaagctggaattcatgttgttggcacttgaatcctctcgtcgggcgttaccattatgcagaccaaatccacctgttggatgcgtgattgtccataaaggtaaagtggtttccaagggtttcactcaatctccgggccaccatcacgctgagatagacgctatgtcgaaactaaccttgccaattggtgaatgtgagatatttgtcacccttgaaccctgctcctttcaaggcagaacccctcctgtgctttgacgctcgcagagcttaagccacaacatatctatattgctatagaagatccgcatcctaggaatcgaggggaaggactcaggattttaaaaaatgcaggtgttggctatacgctcggcatcggtaaaaaagaggtagaggattttctcttatcttatttaataaggtcatagtaaaccgcctaaacaatcccaaactgatcaagtcaggaaaatttgggttcgctcacgctcatattggacctaataaaggttctgtcgcattaagacgtcgtcaggtaacatgctgttttttttacgatgttgcctgaccatgtccctgatccgaaaatctttccaacgcctgcattatcccccgatgttatcgcccagtgtgttcgctggtatctggcgtattccctgagcctccgtaatctggaagagatgatggccgagcgcggcattattgttgatcattcgacgcttcaccgttgggtcatccgcctggtgcccctgttggataaggtgttccgacggtataaacgcccggtgggtcgacgctggcgaatggacgaaacctacatcagagtcagagggcagtggaaatacctgtaccgggccgtcgataccgcagggcagaccatcgatttcctgctgaccgccaggcgggatgccggcgcagcactgcgcttctttcgtaaggctattcgccaccacggtgggccagaaagggtaaccattgataaaagtagcgccaatacggcagcgttggccacactcaatgccgacaaacccgatgaagaaagcatcacgatcaggcagaacaaatatttgaacaaccttgtggagcaggatcaccggaacatcaaacgacgaacgcgacccatgctgggattcaaatcattccggcgggcacagaccatacttgcgggtattgagctggtaaacatgatccgtaaaggacagcttcatcatcaagctggcgaaggattgtcgtctgcagaacaattttatctgctggcagcctgaaaaaacaggtagcgcagatttcatcatcttcactacgttaacgcgacagaaccatcctttttcctctagtggcagcaaaatcatgctcaatgccgctaaaccgacaagcgctggcattagtatcaggataagacgtaggcttctctccatcagccatccagcaatcagcttaccaataaaattagcgatgccaaatccgagtagtattaaagacaaacaatccacatcaagttgggcaatattttcaagagccggacgaatataggtaaacagtgcatactggccagtatgggcaatcacacatcccgtcattcccatcgcaataccggggcagcggagtaaatccatgacagatgccgttatcatcattttacgcagagccataccaggaagggtaaatagctggaagagcagtttcagcataccgactaaacttgcagcgagaaacgcactacaccagccataaagcccacctaaatagctccccaaagggatcgaaaatacggtactgacagcaataccgctaaaaataatggaaagagcacgcgggacacttttagcagggaccagccgcatagcgacggcagcaaccatactccagaatcctcccagcactatgcaagggaggtgcgaatgagcatcgcaagtcactgaattatccaagataaaatctcaattgataccgttgttcttcgcctcggctatgcctcacaggcagcgtttagcagagcttttaagtgcatcaatggatatccgctaggcgctatgcgtcagcgacccgcgataggcgttaatacagtcaatgagtgaatgttatctttatcatttgcgggagtcgctgtaggaggccgcactcaacgaattgcaatttccttaatttccgcttctgaccggcttctcatcaactgctctgtttcttagtcgttattataatttttgcacccgagtgcaaaaatcgtttgcactcgggtgcaaaaattaacataatcccaacattgcttttgtatggactttttttatcgtacttaactgcgggaatgtgcaatgagaggagtttcttttcgtcgacttttaacgttcaatatcagatctgtatctctgacactaaaatcaggctaatgacgaaagaaaccaaagcgccaaaaccttcgaaagccacggccagcgatgtcgccgaactggcgggcgtgtcgaaatggacggtgtcgcgggcgtttactcccggcgcatcagtctccgacaaagcacaaaaaaagtgctggcggccgcggaaatactcggttatcgccctaacctgttggcacgcagtctgaccaagaaaagcacacacatcattggcgttgccattgatgagctgaaaaacccgcattcgatgatggttctcgatacggtaacaaaagcattacaaactcgcggttatatgacgttgctgctcaacatcaccgagggcgaaaattatcaggccgtgattacgatggccgatcagcttcaggttgatggcattttgtttttaggtaacgtgctgaccacccagctttacgatgtcgctcacgccatgcatcacatcccgttggtgcaggtttgtcgtaacagtgaggagcaccgcggtgtcgatattgtgaatattgatggttatcaagccggtcgcgagatcgcagagctgtttctcgcgcagggttatcagcggtttggctacatgaaaggaccggatgtcggctctaaccacctgctgcgtatggaagggtttcgtgacgggctggaggcaaaaggcgcgacgctgaatgtcatgatggtcgccgggcattatgatcgcaacgcagcgtatcaacagatcaccgggtactggcaggcaacgccccgcggagagcgtattgaagcgatgttttgtgagaacgatattctggccattggcgtgctcgaagcgctgattgcgcgggatcagcggcacagtatgggcgtcatcggctttgacgatattgacgaggccagttcaccggtctggcagctgacatcgtaccgtcagccaagggaaaaactgatcgccgaagcgctgaaccggctgattgatgataatccggatcccgatggcgactggcgtcatggggaactgattatcaggcagtcacacctgaagaggtaacagaacgaacgttgtttcggatcaggatactaaaatctgaccggaacagtgatagcaataaaacataattgtgcatttgaactatttattcattcttaaaataaaataccggggaaacacttctcagggtttccttccttaatatttatcctctggtgataaatcatcagcttaatcatgttttttaacaggatcggttttctgttgccgctccgcagggatctgcttgcctgaaataagcggttataaaacagttaataaaatgtcgtgctattgaaggatatattcatgaaccgaagagaagcgctcttttcactgagttcactggtcgccaccctaaccgtggtacccaaactgagtgcgaaagaaatgcacaatgtcccgctggaaacacagctgacaaaagatgtgttgcccgtccctgccctgcaaggcggctatcaagtattaaccaacgagactgaccgcaaaaatctggcggctatttttgaccggctgatccccgccgacgatcacggtccttctgccagtgaagaaggctgcatagaattcatcgacagccagctcgcaagcgactacggtgcaggatccgcgctgtatctggtcggcccgctgcgtccggagaatgaagagaaactgatgggcagtccgcaatttctttcctctccgcgtgagcgctatatgaccggactgaaagccctcgaagcctggtcgcagactcaccaccacgcctccttttttagcctcaatgctgatcagatcgatgcatttctgactgatatggaagccgggaaaattaatctcggtgcggatgtcaatagtcaggcattttttgaattaatgctgcaaaacgttcgtgaaggttatttatccgacccgctctatggcggaaataaaaccatggccggatggaaaatgattggcttccctggcgcccgttatgactaccgtcaatatattgaccgtcgcggtgaagatttaaaattaattcccgtcagcctgatcccgaacgattaattgcggagcaacaagatgccagaaataagaaataaaaccgacgtagtgatcgtcggattaggctgggcgggttccgtcatggcagaagaactgacccgcgccggactgaacgttgttgccattgaacgcggtgcatggcgcgatacgtccacggatttcccggtggcagtcgatccggatgaattgcgctggcacacccgtcgtcagatcctgcagccgatgagtgtggaaaccaccactttccgtaacaacagtagtcaggacgccgcaccggtgcgtaactggtctgcctttcagtatggctggaatgtcggcggggccggtacgcactgggccggaatgtcatggcgcttcctgccatgggatttccaggcggcgagccagacgcgtgaacgctacggcgcagagaagctcaaaggcttacaggtgcaagactggggcattacttacgacgaaatgcagccgtattacgatcgttttgagcgcatcgcgggtacttcgggtatcgccggaaacctaaacggtcagccgcagaaaggcggcaatattttcgaaggaccgcgttcgcgcgattacccgacgccgccgttaaaagacacgcactggatgcgtaaataccgcgagaccacgaaaaaaatgggctatcacccgttcactatccctgccggtaatatctcgcaggcgtacgtcaatccgcttggcgttaccatggggccttgcacctattgtggtttctgtgatttccacggttgtggcaacttctccaaatcttcaccgcaggcctgtattttgcccgcactgatgcggcgcccgaacttttccgtgctgaccgataccgaagttttacaggtggtcaaacacgacgatggcaagaccgctaaaggcgtacgtttcatcaccaaagaaggcgttgaaggtttccagcctgcggacgtggtgtgcatcaccgcttaccagatggataacgtgcgcatgatgctgctctcgaaaatcggtgaaccatacgacccgaaaacaggccacggcacggtcggacgcaactatagctatcagacctgcgcgaccgtcactggcttctttgacggcgaacggatgaacccgtttatcggcggcggcgcgctggcggtgcagattgacgacttcaacggcgataactttgatcacagcaatctcgatttcatcggcggtgccgggatcatgggattctccaccgatggccgtcctatccagcatatggatgcgctgcgtccgggcacgaaacgctggggcagtgagtggaaagccggatacgcgcgcgattaccagaccgcagccaccattttctgtcagggcacctctatgccggtacgtgaagcctatctcgatctggatccggtttataaagaccgtcacggacaaccgttgttacgcctcaccttcgactggaataaaaacgacgtcaacatgtcgagatatatcattgatcatgcaaaaaaaatcatgctggaaaccgggggtaaatacgtcacgtccgaaaaccagaccgataaaagctggaacccgtatcagcaggacagctcgcacactatcggtggcgcagtgatgggcgcggatccgaccacgtcagcgttgaatacctatctgcaaagctgggatgtgcataacgtctttgtggtcggcgcttccgccttccctaacaatggcggttacaacccgacgatcactgttggcgcattggcaattcgtgccgctcaggcgatccaccagacttacatcaaaaatccggctcctctggtgaaggcataaatcatgagtacaaaaaagaaaattgcttacagcgtggcggcgctggccgttgtcgctgggatcgtcgcctttggtcatctgtgggaagtcatggacagctcacgatctcaggtcgcggatgacacgacccggctggcggatttccacagcaccgacagcgctgcgattaaacgcggcgaatacgccatgcgtctcggtgactgcgcggcctgccacgaatcgagctttgcgggcgggtacaaaatcagtacgcctttcggcgagttgcagacgtcgaacattacgccagatcgcgaaaccggtatcggcaacatgactgagcgcgacttcttcaacgctgttcgtcaggggcgcggcgaccacggcttcctctatccggcaatgccttacactgcctatgcgaagatgagcgatgccgatatgcacgatctctgggcgtacatgtccacgatgaaaccggtgaaacataaggtggatgaaaacggcggcatgtcgttcccttataacatccgttttgccatgctcggctggaattttctgttcttcgataacagcggtttcacaccagacacggccaaaaccgccgcaaacgccaatatggacatgattaaccgaggcaaatacatcgtcgatggcccggcgcactgcagcgtctgccataccgcacgtaacgtgctgggtggtgaagtcagcggcggttatttacagggcggtagcctcggtgcgtggtatgcgccggatatctcgcaggatccacataccggcataggtgactggagcagcgacgacattgcgcaatacctgaaaaccggctccgacggaaaaagtgttgcggcaggtccgatggctgaagcggtcgagcattccacgcagtatttcagcgacagagatgcacaggccgtcgcggcgtatctcaaaatgctgccgtcctccagaaaaccggcaccgcaggcatttgccatggacgccgctagcaaagaacatggcgcgctgacgtatgaagtgaactgctcggcctgtcacggcgtgaaaggcgaaggcatcaccggcatggtgcctgcttttgcggggaataacgccatgcaaaacgatccgaccaacatgatcaatgccatgctgaatggtgcccgcgcgccgcataccgaagaacgccagactgcggccggaatgccgtcatttgcgtggaaaatgaatgatcggcagatagcggaaatcctcacttatgtgcgtaatagctggggaaatcagggaagtgaggtgacggcagatcaggtcagccatatgcgaaaactgaccggcgcggcggataaactcagtacaacgtcgaagtaatgaacatatcagggcggcatgatgctcgctcctgattaatcaggagaacatcatgattatcagaggaattggacatactggtgtgacagtctcaagcctgacggaagcagaacaatttttcattgatacgctggatgccaccgtgttgtaccgcatcgtgccccggcaaagcagagcggaaaaatagatgcacgcgctgaaggttctgtcgcgttaacggagtgaagatgatgaaatctgcgctacctgttttttcaggctgccagcagataaaattgttctgcagacgacaatccttcgccagcttgatgatgaagctgtcctttacggatcatgtttaccagctcaatacccgcaagtatggtctgtgcccgccggaatgatttgaatcccagcatgggtcgcgttcgtcgtttgatgttccggtgatcctgctccacaaggttgttcaaatatttgttctgcctgatcgtgatgctttcttcatcgggtttgtcggcattgagtgtggccaacgctgccgtattggcgctacttttatcaatggttaccctttctggcccaccgtggtggcgaatagccttacgaaagaagcgcagtgctgcgccggcatcccgcctggcggtcagcaggaaatcgatggtctgccctgcggtatcgacggcccggtacaggtatttccactgccctctgactctgatgtaggtttcgtccattcgccagcgtcgacccaccgggcgtttataccgtcggaacaccttatccaacaggggcaccaggcggatgacccaacggtgaagcgtcgaatgatcaacaacaatgccgcgctcggccatcatctcttccagattacggaggctcagggaatacgccagataccagcgaacacactgggcgataacatcggggggataatgcaggcgttggaaagattttcggatcagggacatggtcaggcaacatcgtaaaaaaacagcatgttacctcacgacgtcttaatgcgacagaaccctaaaaatgccttttcgaatttactgaaaaattggcaggtagccagaatgaagctggttattcctgattatggctggatcatgtacggggtcagggtcagggtcactgcaccccacattctggaattgtccaggatctggggttcagtaaagactgcgcctctttgggcttactgcgccgccgcgcagtaagcgaaacgcatgattttgcattagaacttgaagttcaaaagctgcctttagattgcaaatctaaaccccactcccatatttcattaatagttggattaccgctaacgtgcgtcagcctcaccaccatcggcacaaacagcgacggcggggaggcaacatcaaccacatgatagttatctagattttttgcattaacctcggaagcaggcaataaagttgcagcttcgacgccaagattgaacagttcaataatcaggcgaggctctgaaacctgcatgatcacgtttatttcatgggcatatttgtgcaggctatcgatcaatacttcaaaagtgccattaccgcccgcgcggtgcaataacaccagtggaaaacgcgtcagcgcttctagggtaatacttttcctgggcttttcgggcagtaaacttttggcaataaccgccacaagcttcattggccccatttcaatgacatcaaaggcttttgtcattttcggcttttgaattaacgcaatatcaataattcgctgcaccagtaagaactcgagatgacttgagtcggcaaccgagatatttatttctatttcaggatagcgctggctgagcttatgaataaaactgctgaagtaggagaggaaaagataggaaataccaattctgataatctttttattgcgactggcgattaataaggtttgcagcctgatattatcaatattgttaaggatctctttagcattttgataaagataaactcccgcctctgtaggtattaacgctcggttagtgcgatcaaaaagcggtgcgcctatctcggcttccagctcctgcatgcgcttgctaagcggcggctgcgccatgttcaatacccgcgccgcatggctgatagagccttgctcgacgatggtacagaagtagcgcattcttttgagatccatggatgactccgatctaagactttttattctatactgtcattaaataatgacgctggaatgccgctgaaatggcatcctcttccctgattacagtaattataattaaagcctttaccttttaaagtaaattttttagagcgcgctatacctttcattacgtttcttgattaaactctgctatcgttaatactgtgttacttatctgcccaaagaatagtttattccaacttttatgatctagacgtagactaaaacggtattttttaatttatttctatcggcgtaatttaaattccgcaccacggttatttaaacttacctgagaaatatgatgaaaaatacaacccattctaaaaaagagtcacccgttcacgatcttcgttcagctattgatttcctgcaaaccttaccaggcgaattcgtagaaactaatgtagaagttgacccagaagcagaactctccggcgtttatcgctatgttggcgcaggcggtacctgtgagcgtccaacccataaaggaccggcgatgatgtttaacaatgtcaaaggttatccgggggtgcgcgtggtgaccggcattctgtcgacccgcgaacgtactggacatctgctgaactgcgaacctgaaaaactgggctttctattaaaggattccgtacaaaacccgattcctccagtcaccattgaacgcggccaagccgtgtgccaagaagttattcatcttgccagcgaccccgattttgacctgcgcacgctgttgcccgcgcctactaataccgaagaagatgcaggtccctatttcaccatgggcatgtgctacgcctctgacccggaaacgggcgagtccaatatcaccattcaccgcctgtgtgtacaaagccgcgatgagttgaccatgtggttgacgccgggccgtcacattgacgctttccgccaaaaggccgaggccgccggtaaaccgctaccgatttcgattagtatcggcgtagaccctgctatcagtatcgccgcctgcttcgaaccaccgactacaccactaggttatgacgaattgaacgttgcgggcgcgttgcgtggctatccggtagagctggttaacggcattaccatcaacgaaaaagctatcgcccatgcagagatagtaatcgaaggcgagttattgccaaacgtgcgtatccgcgaggatcaaaacaccaacaccggtaaggcgatgcctgagtttccgggctataccggcgagtcaaaagacgagctgcctgtcatcaagattaaagctatcactcaccgcaaaaacccgattctgcaaaccacactgggccaagcggcgagcacgtcaatctggccgggatcccgaccgaagccagcattcttgacatggtcgagcgcgcaatgccgggacgtttactcaatgtctatgcccacacctcgggcggcggcaagcttttggccgtgctgcaatttaaaaaatcttcgattaatgatgaaggtcgccaacgtcaggctgcgctgcttgccttctcggcgtttccggaattgaagcacgtcattctggtggatgaagatgttgatttgtttgataccgacgacgtgctgtgggcgatgcagactcgttttcagggcgacatcgacaccattaacatcccgggcgtgcgctgtcacccgctcgacccgtcgcaaacgccggaatttagtccgcatctgttgcaggtcggcacctcgtgcaaagtgatttttgactgcacggtgccgttccatctcaaacatcactttgagcgttccaaattcaaaaaggttgacgttaaacacttccttccagacttcaaataataggtaaagagtcatgacaacacggcgaatcatcatcggtatcagcggcgcctcaggttttcaatatggtgttaaggccctgcaattactgaaacctatggacattgaggtgcatctggtgatgtccagaggagctgaaattacacgcgcgctggaaaccgactatcagcggcaggaagtcaacgcgctggcagacaagattcactcgataaccaatctgggtgccacgatttcgagtggatcgtttaaaacgatcggcatgctgatcgcgccgtgttcaatgaataccttaggttccattgcgcacagcctgaccgacaatctgctgacccgcgccgcagacgtggtgttgaaagaacgcaagcggctggtattaatggtgcgagagacgcctttaaatctctctcatatcaacaatatgcgttgcattactgaaatgggcgggatcattttcccgccggttccggccttctatcaacgccctgaaacgctcgacgatatcgtgacgcacagcgtaggccgcgcattggatttgtttgatttggacgtgcctgacctcccgcgatggggcgacagaaataacacgaccagagaaaatttagactaaacattcatcaggagcatatatgttaattgggcctatagctaatggcgccgccgtggtattgggcggcctggcgggcgccttcatgggatcgcgtttacctgaaagattacgtagcgcgctgcctttaacctttggactttcttcgattggtctcggcattattttaatcggtaaaatcaaatcgctgcccgcggtaattttggcgctgattctcggcgcggcgataggcgaattgatttacttcgaacgcaagattggtgaatttggtgcattttcgaaaaaactggttgagcgaattactcctgccaagcaaggtatgagcgcagagttatttgaggagaaatttgtcgccatactggtgctgttttgcgccagtggcaccggcattattggcgcgatgacggaaggcatgaccggcagcccatcgattttgctggtcaaaaccatcatggatttctttaccgccgtcattttcgccacctcgctgggttatgccgtcgctacgattgctgtgccacagtttattattcagctctgcctggtggtctccgccggtattataatgccgctaatttctcccacgatgatgggtgattttacggcggcaggcggactggtgatgctggccgcaggttatcgtattagcggtatcaagctgttcccggtagcaaatatgttacctgcgctagtattggtgatgccgatttcctatctgtggaccagctatattcatttttaatcagcccgagaggtaattggtcgataagctccgaggtatttttccggtttcgaaacttcaatggtcatttattccacagcgccggaaccgggtaataagtggaaggcgccacctcttgcatttcttcgcctgttgtccaaatttaaaagtgtctccacttaagtttgtagatcttttcagttacattcgcgcgtggcctaggtcgcgccgctctgtagtttattcatttctttcgaaagccagaagcgtctttctcaacgtcattcagtgcagccctgattgtaagcacactcgttttaattccacacactttttgagttttcagtcttctcagccatcagcaggcattcttcctgagtcaggttattcagagattcatggagccgcttactgttgtattcattcagccagcgtgaatagaccagggattcacggacacgatgcagcttcacaaatagcttcggcatccacgaagtcgttttaaccctgacccaaaatcctgcgccattcagaaacagaattccggcatgatattgactcccctgaacggaggatgtgtcgatgaaaaagtcacgattcaccgaagagcagattgtttttgccctgaagcaggctgaactgggtacgtcagtgccggacgtctgtcgcaagctgggcatttcgggtgccactttctatacgtggcgtaaaaaatacggcggcatttctccttcggagctgaagcatatgcggcaactggaagaggcaaatctgcggctgaagaggctggttgccgatctgagccttgacaaggcgatgctgcaggacgtgctggcaaaaaagaactgacgctggcatgcctgcgcgaatggggcagggatttgcaagcccgctacagtgtcagtgagagacaggtctgttttgtgctgcgggtcagccgcagctcgtttcgatatcgttctgtggtcgccgacgacagcgcactgcggctacgcatccgtgagataaccgaaattcgggttcattacgggtaccgccgggtacacgtgatgctctggcgggaaggctggcgcgataatcacaaaagaatctaccgcctctactgtgagcagggtctgtcgttgcgcctcaaacggccacgccgcaataaatcggcccagcgctggcaaccgcagcctcagggtctgtatccgaatcacgtctggggcatggattttgtctctgatgcgttgtttgacgggcgacgactgcgcctgctgacggttatcgacctgtacacccgcgaatgcctggggatctgcgtggggcagaatttgggttcaaaataagtggcagaaatgctgaatagcatagcgctcagacgtcctttacagctgacttaaacgctagctggatgcactaaataggtatcatggttctgaatttgtagggaaaatgctggacagatgggtgtacgaaagaggcatcagaatcgacttgtcacgcccgggaacaccgacggacaacgcgacggtggagtccttcaacggcaggaatgtctgaacgagaacgggtttatgtctttggaggatgcacggtgcaaaatcgaggcctggcgcatacactataaccagaggcgtcccattctgcgctgggctggatgacccgtcagaatttgctgagaagtctgccggttgccagaagacacaaccaacatgaagccggttattcctgattatgactggatcatattcggggtcagggtcactaacatcacggtgtattaatcaacggggagcaggtcaagattactgacactggataaaataaccaaagtgtacagttggaggagaaatgaggtaagaaggcgtgctagcggcctagcttttaggattgactcgatagttgggatctccccgttatcatcaaattcaacaggtatgaaagtctatacatcgctctcagcagaccttcagcgtcacgtgcttgtctgctgtgtgccagaagcggacataacgaatatcgctaaacaggtcattccttatagcgattctaaatcggaaaatatccctcacaaaccgatataaggtgccaggaatgcttaccgcattatggctatggcagataaacaaggattacggctgagaagtgactacctgatgactcgcagtcctctggcaacaaccattttaaactcttcacattcggtatgctcatgttctgtacaccgggcaacatgcttcaggcctttgctcaacagctgtaacctgtgaatagtgctgtcaatttgccgggtgaatcgccacaggtttaacagacaccacagagtcatttaagatggcttaaagagaggtacctatgagcgctaagcgttatcccgaagagtttaaaattgaagcagtgaaacaggttgttgatcgtggtcattctgtttccagcgtggcaacacgtctcgacatcaccacccacagcctttaagcctggataaagaagtacggtcccgattcttccactcataaagaacagtcagatgctcaggccgagatccgccgtctccagaaagagctgaagcgggttaccgacgaacgggacatattaaaaaaagccgcggcgtacttcgcaaagctgtccgactgaggtacgcctttatccgcgacaacaaccatttctggcctgttcgcctgctctgtcgggtgctggatgtgcatccgagtggattttacgcctggcttcagcaaccggattcacggcggcatcatgctgatctgaaactgacggggcagataaagcagttctggctggagtcgggttgtgtttatggttattgcaagatccacctcgacctgcgggataccggacaacagtgcggagttaaccgtgtctggcgactgatgaaacgtgccgggataagggctcaggttggataccgtagcccaagattaccaacggctctgaagtgtctagattatccgtggcgattcagattaagcttggatgaacatcatacgggcacgtttttgcccttccttttcctttgccgtgaagaaaccgatccaatctctcacagatatagagctgactggccgacctttaaatgcatctgccatatgtttgactacaactgcctcgtacagattgatggtatttgtacgcagctgagtgcgtacataatccttcatccaggcatcgagacactccttaacggtaagctcagaaaatacgttttgtgattcaaaatacgtgcgtggatttattcccttgtcataaagaaggcggagttcgcctacaagggccctggcatctttaagacccatagccgggtatttaccaagagatatgcgttgcgccttcccttcccatcagaagcgaaactggaaggtcattgcacccagaggtgatatccttacaccgagtccgtcgccatcagaaagctcgggactgcctgtgtacggtttgcggtgaagtgaacgaagttttgtatcgctaagagccatgataatattctgtacgcatgaaaatttttattttgtacccaatatgtactattgatctgctggactagcttagttttattttgatttttttagtttaaataggacaaaataagacatttaatgcaattaaatcatttggttgaatgagtgaatacatacaactataggcacaataaagcaatgtcagacaaaccaattcaacctactttctactttcacgactatgagactttcggcacccacccggcgctggaccgccctgcgcagttcgctggcatacgtactgacgctgatttcaatattatagaagaacctcaggttatctactgtcgcccttctgacgactatctgccgcagcctgaagcggtgatgatcaccggcattaccccgcagctcgcgcaggccaaagggctgaacgaggccgattttaccgcgcagatccatcaggccttcagcgtgcccggcacctgcatcgtgggttataacaatattcgctttgatgatgaagtcagccgtaatattttttaccgtaacttctacgatccttacgcctatagctggcaaaatggaaattctcgctgggatcttctcgacgtaatgcgcgcctgctatgcgctgcgtcccgacggcattaactggccggagaacgaggaagggttcccaagcttccgccttgagcatctcacccgcgccaacggcgttgagcacgagaacgcccacgacgcgatgtctgacgtctacgccaccattgccatggcgcgtctggtgaaacaggctcagccgcgactgttcgactacctgcttgaacatcgcaataaacacaaaatcaacgcgttaatcgatattccgaccatgacgccactggtccacgtctccggtatgtttggtgctgcacgcggtaataccagctgggttgcgccgctggcgtggcatccggaaaataaaaatgcggtgattgtctgtgatttggcggggatatgacgcctctgctcgaactggactctgaccagatgcgcgaacgtctgtatagccgtcgcggtgacctgctgccgggtcagtctctgctgcctattaagctgctgcacaccaataaatgcccgattctggcccctgccaagaccttgttgcccgaaaacgccgagcgtttggatattgaccgggaccgctgtctgcaaaacttgcagctgctgcgccagaacagtcaagtacgtgaaaaagtggtggcgctgtacgccgaagctgagccatttactccttcacaggatgtcgatgcacggctctatgacggcttctttggtgatgccgatcgcgcaacgatgcgcataatccagcagaccgcagcggaaaacctgcctgcgcttgaccttaagttccaggactcccgtctcgaagagctgttgttccgtttccgggcgcgcaactatccacacacgctgagtgacgacgagcagcgtcgttggcttacccatcgtcaggaggcgctgagcgccgagcgcgttcaggattatatcctccagctcgagtcactgtataacctgcatgaagaagatgcggagaaaaccgccctgctcaaacagctgttcgactacggtaaaaaactggtcggctaacgcgcttaccaacgcaaaaagggactcaatcgagtccctttttctttacgcataaaccgctaaacagattagattacttcaacttcttcgctcatctgcggcggtggctgacggaagcggcgagtgataaaggccaaataagacaggccaatcgcgccccataccagacccagcgtcattgagctggcttccaggttcaaccacagcgcacccacggtcagcgcaccaatcaccggcagaatcagatagtgaatgtggtcacgcagcgtgcggttacgtttttcacgaatgtagaactgggaaattaccgacaggttaacgaaggtaaaggccaccagcgcaccaaagttaatcagcgcggtggcggtcaccagatcaaagctaatcgccgacatcgccaccaggccaaccaacaccacgttaaacgccggggtacgccacgtagggtgaacgaaaccgaagattttctctgggaatacgccgtcacggcccatcacgtacagcagacgcgaaacaccggcatgcgccgccatgcctgatgccagtacggtcacgcaggagaagcacaggataacgaactggaataccttaccgccaacaaacagcatgatctccggctgagacgcgtccggatcgtggaagcgagagatatccgggaaatacagctgcaggaagtaagacaccaccacgaagataatgccgccgataagcgcggtcaaaaagatcgcgcgtgggataactttagccgcgtttggcgtttcttcagacagtgaactgatgccgtcgaagcccaggaacgagaagcacagaatcgtcgccccggtaatcatcggcacggtatgcgcattctcggaccagaacggtttgctgctcaccagcgtgccagtgccttgaccatggaacacgccataaatcagcaagccaacgataagcgccatgatagccacctgaaccaccaccacgatgctgttcatattggcaaccagcttaatgccgcgcaggttaaaggccgtcatcaggcctaccagcgccacaacccagatccacgaagggaagcccgggaaaatcgcctcaagatagattttggccaacaggatgttgatcatcggcatgaacaggtaatccagcagcgacgaccagcccaccatgaagcccacgtgcgggctaatcgccttctgcgcataggtgtaggcagagcccgctgacgggaaacgctgaaccagcttgccgtagctcacggcggtaaaaagcacggcaacgagcgcgaacaggtacgcggtcgcgacgtgaccgtcggtcatgctggtaacaatgccgaaggtgtcgaaaatggtcatcggctgcagataggccaggcccatcatcacgacctgcattaaggtcagggtacgacgaagcttcacgcgaggtgcagcagcaacagtagcggtgtgattatgcgacatggttcagcctccccttacctgcaacatcctggcgtgctacggcctgattcagcaaggtactggggatactgctcgatgataaaaatgggggattcatcctcacgttgctgacgcatggcgagaaggcggcgtgctgttgtgcacggtggaaagcaacaccggaaggaaccggtacaggtttgaaaaattgccccatcttacatttcctcatagtgccgaccgtttattaattgggggtcgcgcacgaaatctggttatctatccggatctgggtccggcctctgttggattagtgtaaaaaaccatgcaaaaaaaataaccggcgcgtttaggcgtcggttattttgcatggccgctattttgcaccaagacttggccttatttcaagatattgcgggcttaactcgacaatttattttcttaatttcccgactgacccaacggacagtaaggtaaaaatgaacatcatgtcgacgaaaagctgaggcaatcatctaataaatcaggcgttttttagcatccaatcaatttctgtttctgttacacggcgttcaaactgaagtaattcatcagatttgcagcggtgataaacatggctgaatcgctcgcccaaataacgtttgagttcggtttgttggtcaaattcttgcagcgcgtcactttggcggataggcaacgggaacccttcctgctccagaccgttgccggtcaccggctcaggcagcggcaaaatgttgtctaatccgtacagaacaccggccagcaccgtggcgaccaccagatacgggttggcgtcagcgcctgctacgcgatactccacgcggtgatttttggcatcgctgcacggcactcgtagcgcaacggtacgattattgtggccccacgaggcttgggtaggtacatacataccgggctggaagcggcggaaggcgttgatattgggagccaataccgccatcgaagcgggcatcatggcaatcattcctgccagcgctcgtttcatcagcgccgagtccttaccctcttcttcgttggagaacaggtttttgccgttgtcgtccagaatactgaggtgaatatgcatgccgctaccggcgtactcgtcataaggtttggccataaaggtggcgtccatctcgtgattttcggccaccaggcgcaccagtcttttcagcgccagcgcgtgatcgcaggcgctaagaatattttctgtatgatgcagattgacctcaaattgacccggggaggactctgccacggcgccatcggccgggagcccctgaatgtgcgccagccggtcaatgtcgctcaagactgcagcgaaatggtcaagattatccaaagaataaacctgattctgtatgttgcggtcctgcgttccgggggtgcagggtggctgcaatgcgccctctgcatcgcgctgcctgtcgagcagatagaactccaactctaccgctaccaccgggaacaggccccgttggcgcaatgtttgccagatatggttcaacacattgcggggttcaacgtcaaagggagtgccatcttcgtcaagcatggtcaacagcaactgcccgatatgttcggggtcggaggcggaaggtgtcagcgtgccggggataggcaggcagatgcggtcgggttcacccagctcttggccgagacccgcttcttccactacgtttcctaaaatgtccatcgcgaagacggaagccgggaaataacagcctttttcgatttttcgaagcgcagagagagggatgcgtttaccgcgaaaagtaccatttaaatcagtgaggagaacatcaacgtgctgagttagtgggtgacgctccaggtactgggacacttcatcctggaacgcgctgcttcgcttctcttcgccttgaatcgcgaagtcttcaacttcgatgttttgagtaatcaggtcaattgcttgcataggatttccgccgtttgcatgtgactggcgtctaacacattaccctcatggtaatgtacgccaacgttaattcgctctgttcaattgctgtattcccgcgattaaaggtgccaaagagaagataaaaaatccgtttaaaccgatcttaataatgtaaatgcactataaatatagactatgtaggcgaccttaagattgccgacttaaaaaccttaacctctgcatacagcccttgcaactgcaacatcctattaacacttccgtttgatcatgcttcttcaggctgctaagttttaaaataaacggataaaaaaaagtcacttttgttgggcgaaagcggaacaataggaaggctatcagcattttaatcaactcacaggggtgggaaaatggacaatatttctttcactttagaaagcaaagaagcgctgagcacgtctgaggcggcctatcgtccggttatcggcgtcgtaatgtgtgaaaacactatcgatgaaaacccggcgctgacggtccatgagaaatatctcgacgcaatctttaatgccgacggattccctatcgctcttccccacgaactggcctcgcgtgaaggcgccctcgaaagtattctttcgcgcgttgacggtatttttcttaccggcagcccgagcaatattgaacctcatctttatggggaagaaggcgtcgaggcgctggctgaccccggacgcgacaagctgagcatcgcgctgataaaagccacgctggagaaaaaaatccctcttttcgccgcctgtcgcggcatgcaggagctggtggttgccacaggtggcacgttgtaccgtaaagttcacgaacagccgggctacatggatcaccgcgaagacactcatcttcctcacgacaaccagtatgatctggtgcacccggttgaaatcaaacccggtggcctgctttcggagcttttgcctgattatcaacgtttcgaggttaactcgctgcacggtcagggggcaaaacgcttgggcgcaagccttaccattgaggccgtggcgccggacaatctggttgaggcggtcagcgtgcgccaccacccctttgcgctcggtgtgcagtggcacccggagtggcatagcctgacggatccggtatccaaaaagctttttgaagcctttattgcggcatgtcgggagaggcatgagcttttgaaaatttagaattttcataattacagggcggctgcccttgacctgacttaaggttttttaggtcaagggcagccgctttataagcgaagcgtctgctattgatcccaaagaacttatttgcaattaaaagcctcttaaaagccctaccttataataattcctcccaccttatatccttaagttcgttgcttaaatccctgtctgtgatacaaatttctgcttaattttttttagtgacggtttcaccggctaactattttcaccgctatcaattctaataagggtttctcaccgtgagttcgccaccgctttcttcacgcctggagatgcgtaatatctcaatttcatttggcggcttttctgcgctgcatcaggtggacttcacgctcgaaggggcgcggtgcatgcgctggtgggcgccaacggtgctggcaaatctaccctgatggccgtactttcaggggcttacagtcactacagcggccagataatcattgacggaaaaccggtcacgatttcgcagccgcatcacgcgcgtgaacaagggattcatctggtgcagcaggaggtcgacattgcgctgatccccacgctcaacgtggcggaaaacatcatgctcgacgagctttcagaagccgggcatctgcatcactggtcgaaaatttaccaaagtgcgcaagagcttactcagcagctgggtctcaagattaaccttcgtgagcgcatcgaaaactgcacgctggccgagaaacagctgattttactggcgcgcgcgctgtcgcatcaatgccgttttctgatcctcgatgaaccgaccgccccgctcgaccacgccgagagcgagcgcctgtttgcactggtgcgtcgcctgcgtgacgaaggaatggcggtggtgtttatctcccatcgcattcatgaactgcgggatatctgcgaccgcatgaccgtgctgcgcgacgggcgtctggtgagcgatgacagcatgcggggcctcaccaatgagcacatcatcgaaaagatgattggtcaccagattaacgatatctaccccgctcgccgccccgcgcacggcggtgaaacgctgcttaaaatcaaaggactgcacgataaacacaagctgcgcgacatcagcctcacgctgcatcgcggcgaaatcctcggtatagccggtctggcggggcgggtaaaaccgaactctgtaaggcgctgttcggagcgtcaccaagccgggttgaccacggcgagctctacggcaaggcgtggaaaccgagcgaaccgtatctgtcggtggagcaaggcatcgcgctggtgccggaagagcgccgtaaagaaggcgtctttatcgatgaagatatccccatgaacctcagcgttgccgccgacaacagcttctcgacgctgggcatattcaaccgcgcggcctcactgagctgggccaaagagataatcacccgtctggggatccgcgcctcaggaccgttgcagaagctggctcgcctctcggggggaatcaacagaaggtcgcaatcggtaaatggctgcgcagcgagagccagatccttatcttcgatgaaccgaccaaaggcgtcgacattcgcgccaagcaggacgtcttcaggctgattgatggactggcacaacagggaaaaggcatcatttatgcttcgggcgagttcgccgaactggtcggactgtgtgaccgaattttagtactttgggatggtcgcatcgtcgccgagcttaacgccgccgacgtcgacgaacagacccttttagattattcaaccggaggaaccccgcgtgagcaacgaacaccccttgaacgcgccgcaaccctggcgtcatcatattttcgaatttctttataagtggggaatgttgctcaccgtggtggcgctgatcgcactgtttggtctttcttccagcaacttcctcgagatgtcgaacatcatcaacatcatgcgatccatcgcaatagtgacggtgatcgccatcggcgtatcgctgtcgctgtcagtgggcggcttcgacctttcggtcggatcgaccgcgtcgctggccaacgcgctggtgatctcgatgttcgtctggcacggcttcggcaccgttgaggcgatcgccattacgctgtcgctgtgcctgctggtagggctgttcaacgccttcctgattgttatcctcaaaatccctgacatgctggccacgctcgccagtctgttcgtgattcagggtgcggcgatgacctacagcttcggcgggtcaatcaccgaaaatatgctgatgccgagcggcgacatggccgaaggcacggtgccggcggtcttcagcctgctcggtcaggtgccggttattgtcatcgtgatgctggtggtgaccgtcgccgttcagctgtttatgtcgctgaccaagcacggccgacgtatgtacgccatcggcggcaacccgctggccgcacgtctggccgggatccgcaccgctcgctatcgcgtgattgcctatctaatgtcgtccgtgctggccggggccgggggattttgctcgcttcgcgcatcggctcatcacaggttaacgccggtggcggctatctgatggacgcagtcgcggcagcctatatcggcttctcgttggccggttcaggcaagccaaatgctctgggtaccctgctcggcgcggttatcctcggcgtgctgcaaaacggactggtgatgctctcggtgccttactacgcgatggatatcattaagggactggtgctggcgattgcgctcgcgctgacctatattcagaaaagatagtcaataaaaaggctcctcacggcgaggagccttttgcaatcagatagttggcgtagccaccagaccgtcgatcagaatttgcggcgtaccctgcgagcagcgttcgatacgccctctcacgccatagaccttcgccagactctcggcggtaatcacctcttcgggcttgccgtcggcaatcagttgaccgtctttgagcatcagtacgttgtcgccgtgacgcagcgcgatgttgatatcatgcaccacaaccacggtaataatgtttcttttacgcgtctcgcggcgcaccaggtccatcacgtggaactggtaattcaaatccaacgcgctcaggggttcatcgagcaacagcagcgaaggttgacgaatcagcgactgcgccagccccaccagctgcttttgaccgccagaaagctgatccagatatctcagcgccagatgttcaatacccagcagtttcagcaactccatcacctgcgaggtggtctgcgcctgatgtgcaaagccacccgatgcgcgttgagccacaatgatcgactctaaaacgtgcagatgcacacccgccggcagcgactgaggcagatacaccacctgctcggcgcgcttggcaaacggcattttcatcaggtcgtgaccgtcgagaatcatctcaccctgcgcacggttcagaccggcgagcgagcgcagcagcgtggatttaccgctgccgttggggccaagcagcacggtgatttgtccacgcggaagcttgggcacgttgagactgcttatcaccgcgcgtttagggtaaccggcggtaaagttacggatttgcaggccctgcgcggcatcttgacctttgcgaggttgcagagaaatcacattgtcatctatagcaaggctcataccgtccctctatggcgcagaataatgctcaggaagaaaggtacaccgaccagcgaggtcacaatccccaccggaataatcacgcccggcaccagatttttagaggcgacagaggccagagacagtaccagtgcgccaatcagtgcgctggcaggcagataaaaacgatggtcttcgccgaacatcatgcgcgcaatgtgtggcgcgaccaggccgataaagccgataggcccgacgaacgccaccgccagcgcagagagaatgctgatgcgcagtagcgtgccgagacgcagacgacgcacgtcaataccgaagcttacggcgcggtcttcacccagacgcagcgcggtcagtttccaggaacttttcatcgacagcggcagcagaatcacgaaagccccgccatgaccgccagttttatccaagtcgcgcgcgccagactgcccatggtccagaacaccaatccctgcaaggtatcttcggaggcgataaactgcatcagcgagaccagtgcgttaaaggtaaacaccagcgcgataccaaacagcaccacgcctgagctggcaacctgcgtccagcgggtgataccgtcaagcatcagcgcggcgagcagcgcaaagataaaggcgttggccgagataaaccactggtcgggaataccaggaataccgatattcaggacgatagccagcgcagccccgaaggccgcggcggaagagacgcctagagtgaaggggcttgccagcgggttattgaggatagtctgcatctctgcgcccgccaggcccaaagacatgccgaccaccaccgccatcaaggcgtaaggcatgcgaatatcccagacgataacgcgagtccccgcgtctgccgcctgagcatggaaaatagtttgccacagcgtatcgagcgacagccctgctggccccatcacaaagtcgagcaccagtgaggcgaagatagcgatcaccagaaccaacatcagggaaagacgacgacgcagaatggttttgtagcgtcccatcacgctgccgtctaacgttggctcgtcacggtggctggctacattgaggagaggatcggttgaagcactcatgtttacactcattctcgcttggcactgcgtggctaaaagggctagataacgcgggtacaataggtaacagtaatataaacgataactattatcaatccagtataaagcggccgatgcgctgtagcttaacaaaaaacggtaaaattagcggcttaggggtaacaaagcgtaacccgaaatgactcccctctcccgcgcgtttggcgaaagaggagagagacagaggccggtggacaaatcagcctctgttaaaacgactatttaatctcggtctcagggaattccatgtcctgatacttgatgaacttagtgcccctggtcagcttgtaaccaaaccaaatcaccaggaacagcgggattccgatataggtcgccgcaacgccgtaccagtcaattttagcctgcaagaacgcctgatagttctgacctagcgtgatgataagacacagcacgaaggcaaaaatcggtcccagcgggaacaggcctgaccggtaaggcagcgcattgaggtcacgcccctgtgccacatagccgcgacggaaacgataatggctgatggcgatacctagccaggcgataaaaccggtcatgcccgaggtgttcagcagccacatatagaccgactgattgccgtacatcgaactcaggaagcacagcgccgccaccacggtggtggcatacagtgcgttgcgcggcacgccgcccttcgacagcttggcgaacatgcgcggtgccttgccttcggtcgccaggttgtagagcatacgggttgacgcgtacatgcccgagttacctgcggacagcaccgccgtcaggataaccgcgttcatcaccgccgccgcagacagcagaccggcattgcggaacaccagcgtaaacggactcacgccgatatccttcacgtcgttacgcagcaggctcggatcggtgtaaggaatgatcaggctgataaccagaattgccagcacatagaacagcaggatacgccagaatacctgacgcaccgcacgtgggatgttcttgcccggatcttcagactcacctgctgccacgccgatgagttcggttccctggaaagagaagcccgctatcatcgccacgccaatcatcgaggcaaagccaccagcaaacggcgcatcgccgatagtccagttatgccagcccgcgtgctcgccacctttcataataccgaagatcatcatcacgccaacggcgataaagacgataacggtcagcactttaatcagggagaaccagtattcggcctcaccaaaaccgcgcaccgaaatatagttgagcaggaagatcacgccgaggaacagcgcactccagatccaacctggggtatgagggaaccaatagttcatcaccagctgtgacgcgaccagttcaacggcaatggtcaccgcccagttgtaccagtagttccagccgagtgcgaaaccaaagccttcttcgacgtattttgcgccgtaagtagagaatgagcctgccaccggcataaaggccgccagttcaccgaggctggtcatgatgaagtacaccatcagaccaattaacatgtaggagagcagcgccccgccgggacctgcctgagaaaccgttgcacccgaagccacgaatagcccgtaccgatggagccaccaatggctatcatggtgaggtgacgggcttttagctctctacgcagagtgggagccacctgctgattttttgtatgctgttgagccatctttgccctatttctgctcgtcatgagtaattttaggcgcggattgtagcaaaaactctcgagcgagatagcaggaacaccccatcataagaaggcttcataatcggccgccgattattagcaagaccgtgttataccaattctttgcaataggtgaggaaacgcgacaaggcgttagagatgtgtttttgtcgatggtgaataagataaagcttacgcaccaacggcgggagaggcagcctgatttcgaccagcgagccgctgctcagctgttcagaaatgacgcggcgcgacagacaactaatgcctatcccgtgacgtacggcgtgcttgatggcttcggaattacccagctccatgaccagattgaaatccggcagctgcgacaacagcaggtgatccaatacttcacgcgtgcctgacccacgttcacgcaggatccacggcgcggcagcaagcatctccagcgtcacgtttttaccggccagtggattatccggcgcgccgaagaccaccagctcgtcgtcgagccaggactgagtaatcagttccggcatgcggcacggaccttcaataagcccgagatcaacgcgaaaatcggctaccgcattgatgacgtcgtcggtattaccgacgtttaattcaaggggagtttcagggaagtccagtcgataaccggcaatcatggcaggcaacatatagttgccgatggtgctgctggcaccaattttgagggaaccgctgtcgtgactgaataaacgttcgatttcactggcctgctcaagcagcgccaacgctttcggatacagcaaacgtccgtgctcgttgataaccaaacgcttacccacgcggtcaaaaagcttcactcccaactgcccttctatgtccgccagcgccgcactgaccgccgattgtgataaagacagaacaacagaggcctgggtggttgagccactcttaagcacctcggagaaaacttccagttgacgcagtgtaatatgcatagagtctcgttatctattatccggcctgcccgctgcccgataatttgattgattcaaaagtaaaaagtgctcagcgtcgcatctgcacccttggccgaatccgctcctcccaataaagagtatagctccatccgcaccgccgtgtgcgacaggccattgttatcattctataccagtttttcaggttggttataggattataatcaatttcatatttatgcctgcactggataagcttatgcccaggtcatctatgcaggataaaattatgagccacgtcttacccgaacatcatcgccaacaccaggcgcacggcaatccacagcacaaattcatgctgccttatccttttggacgcgttttaccgggtttagttctaaccgcagcgattaccgccctcgcattgtggttaagccattttgatttgctcaactcgctcggcctcagtgccctgacgttggccatcgttattggcatgttgataggcaataccgtttatccactcgcccgcccacgctgcgccgaaggcgtcaatctggcgaagcaaaagctcctgcggctcgggataatcctctatggatttaaactcacctttacccaaattgccgacgtcggcgcgtccggtgtcattattgatttgctgaccctctccagcacctttttactcgcctgctggctgggaaaacgggtttttggcctggacaacgacaccgcgatgctgattggcgcgggcagcagcatctgcggcgcagcggcggtgatggcaacggagccagtgctgaaggccgatgcggacaaagtgacagtggcggtagcgacggtggtgatttttggcaccgcggcaattttcctctacccgtggctgtggcagctcaacctgcactatcactggctggagataaccgcaagccgcttcggcatctataccggctcaactatccatgaagttgcgcaagtagtcgcagcaggtcacggggtttcccccgacgcagaaaacgcggcagtaatcgccaaaatgctccgtgtcatgatgctcgcgcctttcctgctgctcgtcagcctgtggaagagtcgtcgccagccgcaaacggccgcggctaccgaggggaaaagtctgtggtccgccatcacactaccgtggtttgcgctgtggtttattggcgtggcagccttcaacactttcggcctgctgccgcagagctgggtgcattttctgctgacgctggacacgattctgctggcaatggcgatggcagcgctggggttaacgactcatttcagcgcgctgcgtcaggccggagtcaaacccctaatgatggcggctgtgctgtttatttggctaatcgttggcgggcaggcatcaacctgttggtacaacacctgctctaatgaataaaaagcgggcattttcgcaagacttttaacatttattgcctgccccctgtgcataaagcggttatcattcagaacaacaggacataactaaacagggggtaacatgaaatttgtaggggcacacgttagtgcagcaggcggagtcgatcaggcagtcttgcgggcacatgagctggaagcgactgcatttgcgctgtttaccaaaaatcaacggcaatggcgcgcggctcccctggctgaagatgttattgaacgctttaaggcagcctgccaaaagtacaattacagcagcaaccaaattctcccgcacgacagctatctgattaacctgggccatccggtgacggaagcgctcgagaaatcccgcgaagccttcatcgatgaactccagcgttgcgaacagctgggactgtcattgctgaacttccatcctggcagccatctgatgcagattgatgaagacaagtgccttgccaccatcgccgagtctatcaatattgctttggacaaaaccgagggcgtgacggcagttatcgaaaacaccgccggtcagggcagcaacctcggcttccgtttcgagcatctggcgaaaattattgccggcgttgaagacaaaagccgcgttggggtatgcatcgacacctgccacgcttttgctgccggttatgacctgcgcacccgcgaggcctgcgagcatacctttaaaaacttcgccgacgtggtcgggttcaaatacctgcgcggcatgcacctgaacgacgccaaaagcgagttcaacagccgggttgaccgccaccacagcctcggcgaaggcaatatcggcaagaccgccttcagctatatcatgcgtgactcgcgtttcgacaacattccaatgatcctcgaaaccgtcgacccggaaatttgggccaccgaaattgcctggctcaaagcagaacagacagccgaagacgacgaagccgccgcctaattcttctgccgatcttcggcaagtttttcggccagcctgcgcgtcaactcggccgcaggcagtgctcggcaaagtagcgcaccctgtcgggcccaacggggcccagttgggcaagtagccttatacgcccttctcttttgccgccgagtgcagaaaaaaagtcttcaggtttaatgtcgtcctttcgatataatgagcgtcacgacacgccctgtctcaggatacgacgattggctcgaagaagggttgccaatatccccccacggcaatcagcacaataaaaccacctaccgcggccatcgagttgaaaccaaactgtttgtagagcaacaaccccgatataccgccaataagaaaagacattatagtcaccgcatgggtaataaactggctgcgctgtgccttgatttgtttcgaagggtcacggcgcatcagcgtagctattaccgcgcccaaggcgatgccggcatcggtcagggttccggtaatatgcgtcgaacgcacgcgcccgttggagagctgggttgaggtggaattatggatccccatcaggaagctcagaaaaacgataatttcgtgattgttcttcgacgagaaaaataatatttcaaacaacgaggtcaaaattaacataacgccctcgattagaagaattatgctgaatattgtgcggatattgttctttattccgccgatcgcaatcagccgagaaagcattgcgccaatcacgaaggcgccaataatagccgacagaaacagtacgtcgcttaaatcagtattcgatacttctgaagaaagctgagaggtatttccagacatatgcgagggaaaaaaaccgaatgcgcccaatgccatggcattgagaataccggccgtcgttgccagcaaaagagccagatgacggtcttcggtgtgcgtcctgccaccctttcgttttatcaacatattcaacatgatggcaacctcgtttaactgttatttaatcagtatatataaccaaatacctcaaatagcctatttattaaaagtattgtaaatatttgtctttattacggcgaagcaaaattcacctcatgacaaaaacagcaataggacgattattatcgttaaggggaaaaatattaagttataaaatttcaataactaggaggatatttacccataaatagatgacatcatcctgctactcataaaaatagcggcaaaaaaaagcgctgcccgagagcagcgcttatcattataaacgtttgaaagcttagctgtttgcaacgactttcgcggcaatcgcagcatcagaacgtttaaggatggcgtaggccacacccgccagcacggtaccggccagaatggccaccaggtacagcagaaccggtgtgatagcgccagggatgagcagcacgaacagaccaccgtgcggtgccatcaattttgcaccgaaggccatcgacagtgcccccgtcagcgctcccccagcgatacagcaaggcagaacgcgcatcgggtcacgagcagcgaaaggaatcgccccttcagagatgaagcacaggcccagcaccagcgccgccttaccgccctcgcgctcaccctgttcgaacttatgacgcgccagcaaggtcgccagacccatcgccagcggtggcaccatacctgccgccataatggccgccattggggcatagaccgaggaactcagcagagcgacaccaaacgcataggccgctttgttaaccggcccacccatgtcggtacacatcatcgcgccgaggattgcgcccaacaggaccgcattggcggtgcccagagactgcaaccatgcagtcagacccgccatgattttcgcgaccggcgtacccaccacgtagatcatgattagaccggttatcaggctcgccaccagcggaatgatcagtatcggcttaagcgcttccatactctgcggcagacgcagcttgttgctgataaatttcgccacataacccgcgaggaaaccggcaatgataccgccgatgaaccctgcacccgtgctcaccgccaacataccgccgataagcccggagtcagacccggacggtcagcaatcgagaaagcgataaaacctgccagaaccggcaccatcagcgcgaaggccgatgcaccaccaatctgcatgagcgcagcggccagcgtgcctttaacttcaaaggccttgataccaaagatgaatgacagagcgatacacagccctcccgccaccaccatcggcagcatgtaggacacaccggtcaacaagtgacgatacggaccgctgccagtctcttttttcttgccggaagacgcctgcccctgcttcttaggctcaaacagctcggcttcgaccagtgccttgtctaattcctgcttggtctttttcagcgccaggccggtcgaggtacggtacatctgcttaccggcgaacttctcgaggtcaacctcgatgtcggcggcaacgataaccaagtctgcggcggcaacttcttcaggggtgatggcattaccggcaccgacggagccgcgcgtttcaaccttcacccaccagccacgttttttcgcttcactttcaatggcttcggccgccataaaggtgtgcgccacgccggtcgggcaagcggtcaccgcgacgatacgtttaggaccggcagcagcaggtgccgcagaggccgcggtttgcaccggcgcatgataggctttagcttcggtggaagcgcgctgcacgaaggcatccggctcacgcaccgcatcggccagcgatcccagatacaggttcttaccgttcagtccggcttctgctggcacggcatcgcccacggcgagaacccattcggcttcagcggcgcgagtgacaagctgatgccctgacttttgcacggcggcagcaagcatattttttgcaatctgcgcacttgcctgtccaatctctttgtctactatcagcagcgttttcattctttctctcctgctgtcaattaaaaggtttcagatcaacacgtgccatcatcgccgccaattgtggacgggagctgacaccaacattgctttggctaacggccaacgccgcgacggcagtagccagacgcagggtatgttcgctggactcacgcatcagtaggccgtaaatcagtccaccgaccattgagtcaccggcccctacggtactaacgacttcgcaggaaggcggtttggcaatccatgcacccgaggcgttgacccacagcgcgccttctgcgccaagggagataacaacgtgagcgataccctgatcgcgcagcgcgtgagcggcttcgaccacgtcgcttaagtcgttgagcttgcggccagcccagatttctagctcgcggcggttaggcttaaccagccaaggggccgccttcagtccggcgaccagcgcttcacggctgctgtcgaaaataatgcacgggcactgggtgcgcagacgagccatccagtcggtgaacgcctgcgggtcgacacccgcaggcaggctgccgcacacggcgaccatgtcgaactgtcccagccagctcagtgagtcgttaacaaaacgctcccagtcctgtggcgtaacctcgaagcccgagaagttaaagtcggtcacttcggagtctttttcggtcagtttgacgttaatacgcgtgcggccttcgaccacctgaaaacggttggcgatgcccaggctgctaaacagatgctgaaaaccgtcctgattctctttacccaggaacccgcctacggtgacgtcgatccctaagtctttcaaaactttggcaacgttgatgcccttacccgcagcgtgcaggccggcggtctgcaccagattgacttcaccgcgttctatttcaggggtgtaacccaccagatcgtaggccggatttaaggtaatagttgctacgcgacggctcatgcgccctccccaagaccttcggaaatcgcttcaccgatggatttcaatgccacttcggcgtcttcaccgctggcggtaaagcgcaggtggtgcccttttttaacacccagagcaacgaccttcatcaggctgcgaccattggcaggtttgccgctaccgtcgaggttggtgacggtaatctcgctgttaaatttcttgatgcagttgaccagcgccgtccccggacgcgcgtgcagtccgtgttcgttgcggataacgtattcggcagtcaacacctggctctgctcttccacttcgctggtcagcagcgccagcacgcccacggcatcggcctctaacaggcgctcggccttaccggctcgaagcagatcgcccaggtagttcagcaaatctaaaggcttgtcgtcggcgacggccagcgtcagcagcagggccaccttttcgccgtcgctttcaaatgctgtagcaggacggctcaccgccgcagcactgccgaggttgccgacaacgctgtcactcagccagatgccctgtccgagattcagcggcttacggctgataacgtcgctgacgaaagaggtgtcaaccgcgccaatttgctgaagacgtcctgcgttcagcgcctgcagcgtgataaggctgtcggcggcaacgtctacggcaataagttgagtatcgaaacggaattcggccgcggttttttcgcccatcagcaggctacgcagctcttcggcggagtcggtttttgccatttgctcggcgacactgtcatcgctgagcacgtgggtcagctgacgcagcaaggcaaggtgttcgtcagaacgggcggcgataccgatgaccacaaacgccttctgtccttcgccccactcaatcccctgagggaactggaacacctgtacgccggtgttctggaccaggtcgcgcgtgtcggtcgttccatgaggaatggcgataccgttacccaaataggttgaagtttgcagctctcgggccaacattccgtcaacgtaaccttcgctaacgcgacccgcggcggtgagcgcagcggcaacctgacggatagcgtcttcttttgtgcctgcggcagcgcccaggtggatgtcttgctgtgacaactggaacataattctcctctcctgccgaaattgaatcgtttcagctttattgagaaaaaaggagcgctggcaggttattttgactaaccggacaacgctgaaacgtttcgtgcagtctcattctgcggcgcttattttgcaagcattacgcgttttggcgttgcatttttatgatgctacgcacaattttccttttttaagttttaaattctttagcgacgcatcgaaaagctgaagtatagctgacctctatgcctcagggtgctgaagcttgctggcattaaagacaacgtggcggctttttagcatcctgtgctggttagccgacgcggcctcttatttgctgattaaaagccgtgtctattgtaaaaaacaggcgtaaaatccgcgcgattcgccttatccccttccttattattgttttggtgcaaacctaaaaaatgacagtttcaaccactaccgcgcgtcgtctccgcctgccggacatgacctccagcgcgttcctgattattgcctttctgaccggtatcgccggtgcactgcaaaccccgacgctgagcctgtttctgaccaccgaggtcaaggtttcgccgtttatggttgggctattttttaccggtagtgcggtgatggggattttcgtcagtcagtttctcggcggctggtcggataaaaaaggcgatcgcaaaacgctaattctgttctgctgcctgcttggcgcactgggctgcgtactgtttgccttcaaccgcagctacttcattctgctgctggtgggcgtactgctgaccagttttggttccaccgccaacccgcagatgtttgcgcttgcccgcgagcacgccgacaaaaccgggcgtgaagcggtgatgttcagctcgattctccgtgcgcaggtttccctcgcctgggtcgtggggcctccgctggcgtttgcgctggcgctgggcttcgggttcacctttatgtattgcgccgccgcggtggcctttattctgtgcgggatcatggtccgagcgttcctgccctcaatgccgaaagcgatgctgactaccgccggtccacttgaggcaccgcgcaacaaccgtcgcgatacgctgatgctgtttatcgcctgctcgctgatgtgggcggccaacagtatttatctgatcaatatgccgctgtacgtggtgaaagagctgcatctgtcttcaaaactcgccggtatgctgatgggcatcgccgcatgcctcgagatcccaaccatgttggttgccggttatctcgccagacagctgggtaagcgtttgttgatgcgctttgcggtaatctgcggcgtactgttttacggcagcctgatgttcttcaccggtcccgccacgctgattgccatccagctgctcaatgcgctgtttatcgggattttggccggtatcggcatgctttacttccaggatttgatgccgggacaggcgggtgcagctaccacgctgttcaccaactcgacgcgtgcgggctggatcctggccgggtcgctggcgggattagtggcgcagttcgccagctattacgcggtgttttacgcggcgctggcaatggtggtggtgtcggtcttctgcatctggcgcgtcagggaagcctgacggccattaaggcgcggtgtcgagctcgagctgtagcagatacgtgaaggcgtcgtcgcgatgggtaaaacacatgtcgcgacgtgcctgtaatgcctcacaaaccttgggccgcagcggtgaagtaaaaatcttgcagcgcatcgtttcatcgagctgaacgcagcgcgtattggcgggtttaccgttaggcatgcctgggatcgggctggaaattgacggcgcgatacagcaagcgccgcagtctgaacgacagtccatcggtagctctcctctgggctgcagattgaatgcgatgtaggttgaaacctaatatcggcagacaataacagcacggtgaaattcccaccacataaatcgtcaaaaaccccttcaggcggccatttcatcactctttttgagctacctacttgcctgaaatcacgcgcacgagtaacgtgtcgcccattatccaaactttttgcaaacaggttatttttatggcacgtgctaacgaaattaaacgcggcttcgttgtaaattacgacggcaaactgctgctggttaaagatattgatgtacaaagtcctagcgcgcgtggcgcaagcacgctgtataaaatgcgtttctccgacgtgcgtaccggcatgaaggttgaagaacgtttcaagggtgatgacatccttgataccgttaccctcacccgtcgtaaagtgaacttctcctacgtcgacggcgacgaatacatctttatggatgacgaagactacacgccttacaccttcaacaaatcacagattgaagaagagctgctgttcattcctgaaggtggactggcaggtatgcaggttctaacgttggacagccagctgctggcgctcgaaatgccgcagaccgttgagctggaaatcatcgaaaccgcgcctggcatcaaaggcgcttcagccagcgcccgcaacaaaccagcgaccatgagcaccggtctggttattcaggtaccagaatatctgagcaccggcgaccgtattcagattcacatcgccgaacatcgctatatgggtcgtgcataaggattgggtttctccccgtcttataaaagagagcgctgcggcgctctttttttatgccggtatgcgacgacaatggaacgatgtcccacgcgcaaagttatgatcgatctcacaaatgcggcttaatatttggacttaccaattttcattcctgtcatatcactttacactgccagtactcattaacgcccaaatcagaccttgattgcctattaaatcttccccgcgcgcttttggcctgaccaatttaacctatgcccgaatgtgatggagtcaaaatgaacaagatttccactagcccgttgcctgccaatgttcaacagccgcagtatgaccgtcgggcgctcaagacccgtattgtgcacatcggcttcggtgcttttcaccgcgcgcatcaggcgctgatgaccgaccgcgtgctgaaccagcaaggcggtgactggggcatctgtgagatatcgctgtttggccgcgataacctgatcaaggcactgcgtgaacaagaccacctgttcaccgtgctggagaagggggcacagggaaatcagccgatcgtcgttggcgcggttcacgagtcgatgcacggcaggattgaagggatcgacgcgatcgtcgagaaactggcagagccgcaggtggctatcgtgtcattgaccattaccgaaaaaggctattgtatcgaaccggtcagcggcaagctcgaccttcagcatccggagatcgtcaaagatttacagggcggacactccccgccaccgcgcctggcctgctggttgaggcgctgcgcctgcgtcatctgcgcgggctgccagggttcagcattctctcctgcgataacattcctgaaaacggccatgtggtgaaaaacgcgattcttggcctggcgcaggagaaggatccggcgctggcaagctggatccacgagtctgtcaccttcccaagcaccatggtagaccgcatcgtgcccgcgcttaccgaagagtttgaagccgaaatcagccagtcgctgggcggcatcggcgatccatgcggtatcgccagtgaacccttcattcaatgggtcatcgaagacaactttgtggcgggccgtccggcatgggaaaaagtcggtgcacagctggttgacgacgtactgccgtttgagcagatgaagctgcgcatgcttaacggcagtcactcgttcctcgcttatcttggttatctggcgggatatcaatatattaacagctgcatggaggatgaaaactaccgccgcgcggcttatcgactgatgctgaaagagcaggcacctacgctcagcgtgagtggaatcgacctcacggcctatgccgatagcctgatcgaacgctacagtaacccgtcactcaaacaccgcacctggcaaatcgcgatggacggcacgcaaaaactgccgcagcgcatgctggactcgctgcgctggaatctgcaacacggcggcgaatacgcctgtctggcgctgggtgtcgccggctggatgcgctacgtcagcggtgttgacgacgccgggcaaccgattgatatcaaggatccgatggcggaaaagctgcgcgagattgtggcaggcagtcaggacggtgaagaaagagtccgtgctctgctggcgctgaagagtgtgtttggggaggcgcttgcgcgcgatacgtcggcaattgaggcgataacggcggcctatctcagtctgcaacgtttgggggctaaagccaccgtcgcgaatctggtgaagtaacgcgctttgccccgctagtcgttaaggctggcggggactgaccggaaaagatagccgtcgaacgtcggatcttcggcgtcggaaatctccagcagtttgcttttcacattctcaagatgctgccacatcgcctgcttcgccgcctttggctcgcggcgcagcactgcttgcaggatctgctgatgatcgttaagccacagttcactgtagttactctccccaatatgctgatgcagcccctgccacatcgggctgtgcttacgcacctgccacagctcatagaccatattcgccagcacgctattctgtgaggcctgggccagcagcgtatgaaacagctcgtcggcgctctcgtcgatgataccctgtgccacaaagcttttctcaagctcgatggcgtcacgcatcttcaggatatccgccttggtggcctgcaccgctgcaaatgccgcgacctcactctcgagcagttggcgcgcctgtaacagctcgaacggaccgtaaccgctgtcagcacgaggcggctggacaccttctgcctgttcgagcacgtaaacgccggaccctttgcgcacctcaaccactttctccagctcgagcataatcagtgcctcacgcacgacgctgcggctgacggaaaaccgttcggcaatgtcacgttcggggggaagccggtcgccgggcagatgctggccggatgcgattgcgtcacgcagctgatgccccacttcctgataaagccgcatgttacccccacttttctgaaaatattgctcaacagtatatcacgcggcctgaaggcgttgcagttatgtgaaaatctgtgaacctatcgcgaaatcatcggcttgctgcatcgtccaatgctgtagcagccgctggcgaacgtcgctcaccagaggcttttcaccgtcgcgtggcggtaaaagtacaaagctgacgtcaggaagcgcgggtagccgcgtcgcatctcgccacggcttaagccccgagggtatcgatgaggcattgaggcaggcaaccccgagtcccgccagcagcgcagactgaagacccgccacgcctgacgccgaatgcgtaatcgcgaaactgacgccgttctcctcaagcaactgacgggtaaacccctgcatggcgcagcctgcggggagggcgagcagcgacagtggcctggcgggatcccagttgaacccttcagctgcgacccagtgtaagggttcgcgacagacctgcgtgccttcatgcgcatgtgccggagaaagaatctgcattgaaagaccaatatcaaaagggtcttcgtcacgctgggcgcggatatcaacacttttttgcactctgacgttcagccgcaggtctggataacgctcgcgcagtttcaccagcatgggcggtatctcgttgggacgaaagtaatcggtaatcgccaaacgcagttcgccggaaaaggacacgcctcgtacctcatctaatgcgcgcgcgctcagtaccagcatctcacgggcaaagaccctagacgttcgccgctgggagtcggcgtcacgccctttttgccacgcagcagcaagctttggccggtgaaatcttccagcttgctcaactgttcgctgaccgcagaggaagagagattcagacgcggtgcggcggcagagatgctgccagcctcaacgacggtaacgaaagacagtagatgatcgagattgaaaggtcgcatgggcatccctcggctttattgatggatatcaccagatgttcctgcttttccgggcaatcagcaacgaatatcctcttctgcatcatcccatcaacctatcggagaacgctatgcctgggatcacgctgcaactttcgggtcatgaagaccctcaactcgcccaccgtctggccaacgcgctaacaaaattaacctgccggatactcgataaacgcccggagcagacgatggttattgtgcgctttgtgcctgccgaactttggtttattaacggtcagtcattgcaggcgctagcgcgtcactcctttaggctggaggtaaccgtcaccgacgagaccaatacccgtgcacaaaaggcgcagtatcaccaagaggtctatgccctgctggcagaaacgttgggcgaactgcatgagcattcgaatattcatatcatcgattgccgtgcgggcgcttacggctatggcggagtgacgcaggagtttcgttatcagcataatgagtcgttttgtagttaaaagagctttccggtggtcatagagctttaacaggctggattttatcttgctggaggggcatcttattgcgcatatttgatgaatggcccgaaggaaaaccccagggaataaggagccttcgggcgctataaggattaaacatgacgcaaacaaacctgataaccggattcctcggtagcggcaaaaccaccaccatccgccacctgctggcacaaaagccggaaaacgaaaaatgggcggtgctggtcaacgagtttggtgaaatcggcatcgacggtgcactgctggcagacagcggcgcggtgctcaaggagatcctggtggatgtatgtgttgtgtcaacggcctgccaatgcagattggcctcaacatgctgctgaaacaggcaaaaccagaccgcctgcttattgaacccaccggtctgggtcacccaaaacaaatcctttcccttctgacttcagacgtttacagcggctggctgacgttaaacgcctcgctttgcctgctggatgcacgtcaactaagcgacccacgggttgtcgccaacgaaaactttcgcgaccagctggccgcggccgacatcatcatcgccaacaaaacggatacctatacagaacacgatgaccggatgttggcacagtggttgagcacgcaggatgcctctttgcagatagagcgcgtctcgcaggggaaaattagcgctgaattgctgaaccagccgcgcagaaacgagcgcgaactgccagagggcaagcatcaccacgcccatcagtcaaagcagggactggcggcgcttagcctgccgggccatcagcgttggcgacgtgcattgaacgaggccggggactattccagctgcggatggatttttgatggcgagacgctgttcgacaccgccgggttcctcgattgggcacggcaggcaccggtcgatcgcctgaaagcggtgatacgtataaaggaaggcacattgcgggtgaaccgtcagggtaatgaccttcacatcgacacgctttcggcggcgcccttagacaacagaattgaattaatatcccacggcaagaccgactggaacgctcttcaatccatcttgttgaggattcgtttaagttagcaggcttaccgtatcgctagttatgatatttttattacttaaaacaggttttgatttatgtttcgccgcaatcttcccgtgatcctgctactaaacgtattgggtatcgcgcttttcctctcttattatctgccagcaaaccacggtttttgggcgcctatcgatacgtcggtgttcttttattttaatcgtcatctggccaccaacgagacgtttctgcactttgtggccgtcaccaataaccgcgcgttcgacgtctgctccctgctggcgatggggctgctctatttctcttatttcattaaagaagaccgcacggggcgtcgacgcatgattattatcggcgttgtgatgctgttgacggcggtggtacttaaccagttgggccatcaactgccggtcgcgcacaagagtccttcactgagttttccgcacgttaaccgtgttagcgaactgaccggtattccgaccaaagactcgtccggtgacagcttccctggcgaccatggaatgatgctgatggtgttcaccgtcttcatgcttcgctacctcggtaaacgcgccttcgcgatagccgttctgataaccgtgctgttctcgatgccacgtctgatgattggcgcacactggttcaccgatatcatggtaggttcattgtcggtagtgctggtgggtgcaagctggtggttaatgacccctgcgagtgattttttggtcaactggcttgataaaaagcttcccaaaaaagcgctaaaataatcactctttaagaaaaaactcattctgaaagacatcgttttttattatggctcgaacaacattgacatgttttcgggccatttaatttgttgccaatgtaaataggcggaaagcgaaaaatgctcgcagacccgtcctgctgcggttttaggccaaatgagcacaaaactcaatcagcgatttttaaattaatagttacattgctttacatcattatttcttattaaaaaagcgttaaaacctctcgcattccccgatcattacggtaatctcgaccacgttgcacagaaatgtggcatgactggcttgattccaattaatagtgtgctgttccgcacaatttgctggctaagcctttgcccgagactgtagcgacgggtaatctcgcttggttttggcaaattgataacgaacgttttgtttcgttaaggacagcaagggaaaacaacaataatggtcaagtctcaaccgtttctgagatatgtaatgcgggctatccccgcgattggcgcggcaattcttctctccgcgtgtagtggtatacattcttcgaacacagaaaacgcacaaactgagatgcatgcagttaaagacaaagatggtcttttacttcaagcctctcaggatgaattcgaagcaatggttcgtaacgtcgatattaaatccaaaatcatggatcaatatgcagactggaaaggcgttcgttatcggttaggcggtgacagcaagcgtggtattgattgctcagccttcgtacagttaacattccgcgaacaatttggcatggacctacctcgttcaacctacgaacaggaagacatgggcaagaagatacagcgtaacaagctgcgtccaggcgacttagtgctgttccgtgcaggctctaccggccgccacgtgggcatttaccttggcaacgatcagttcgtccatgcttctaccagcaacggcgtgatgatttcaagcctgagcgaagcctactggaccaagcgttatcgtgaagcaagacgtgtattgaccggtgctagaccgagcagcaatacaggtacactcacgacggcgatgttgcagtaaaagaatctcctcttgttgttcaagccaagcaaataaaaaagggccctccgcgagggtctttttttatggctgttccacaccgcctgaacgcctacccgcccagacgctttctcttaggtccttgcctaaacttgtgataaaacaaccaaaatggtcgtttacagattttcaatctattattgagtcatcacagcgtcagcggcgccaattcaggagttaattttcaggatgtttcctcgcgcactcatagctctgtttctgtcgctcacaggatttactgcgcacgccgaatctatcgatgatggctacgcctttgccattcttggttcgccaaaatacatttataacttcagtcattttgactacgtaaaccccgccgcgccgaaaggcggtagcattaccctgtcggccatcggcaccttcgacaatttcaaccgcttcgcctctcgcggaaatgccgccatccgcagcgacacgctctatgacagcctgtttactccctcaagcgatgaaataggcagttactatccgcttatcgccgattctgcacgctatgacagcgacttccgctgggttgaggtcgagataaaccccacgcggtgtttcaggacggcagcccgattaccgccggtgacgtcgagttcaccttccataagttcatgaccgagggcgtaccgcaatttagggtggtctataagggcgtggtggtgaaagccattgcgccgctgacggtgcgcttcgagttcccgcagccgaataaagagcagatgctgggccttttaggcctgccggttattccgaagacgttctggagcatcgaaaattcaatgagccactggcgacgccaccgctcggcagcggcccctatcgcatcaccgactataagctaggccaatacatcatctattcgcgagtcccgaactactgggcggctaacctgccggtaaaccgtggacgctataacttcaacaccatccgctacgactattacctcgacgataacgtggcgcttcaggcctttaagtcgggtgcctttgattttcgcagcgaaccctcgcccaaaaactgggcaacacaatatcagggcagcaacttctcacggaatttaatcattcggcaggatgatgagaataaggcggcgcaggacacgcgctggctcgcattcaatattcagcgccccattttcaaggaccgcaaggtcagagaggcgttgacgctggcgtttgatttcaactggatcaataaggcgctgttctacggtgcctatcagcgaaccgacagctatttccagaacaccgactatgcggcaaagaactaccctgacgccgccgaactggcctggctcgcgccgctgaagggcaaggtgcccgatgaggtcttcagcgagctgtatcacccgccgtccacggacggcagcggcaatgaccgcgcaaatctgcttaaggcaacggctctgctcaaagaagcgggctggacggtcaaaaaccagcagttggtgaacaatcaaaccggcacgccgttcacttttgaactgttgctcccgagcagcggcaatacgcagtacgtgctgcctttccagcacaatttacagcggctcggcattacaatgaacattcgtcaggtcgataactcgcagtttatcagccgcctgcgcaaccgggattacgacatgataccgaccgtttatcgcgcacagccttatccgggcaccgacctgcagatcatgtggaactcgaaatatctcaattccacctataacacgccgggggtgtccgaccctgcgattgaccagttgaccaacgagattgtggcacatcagggtcagccagatgccctgctctcgcttggccgcgcgcttgaccgggtgctgacctggcacatgtacatgattccgatgtggtacaccaatcgcgaccgttacgcttattgggacaagttctcgatgccggaaattcgcccgccctactcgctagagctggacacctggtggtatgacgtgaacaaagcctcgcgcctgcaatcggccagacagtaaggagactcacttgactgcttatctgcttcgccgcctgcttctggttattccgacgctatgggcgattattacaatcaactttttcatcgtgcagatagcgccgggcggcccggtcgatcaggctatcgcggccatcgagatgggccagaacagcggtctgccgggcagcaacggcggcagtggaaccggccatgccaacgcaggcgtcggtcaggtcggcgacagccagtaccgcggctctcgtggccttgacccggaggtgatcgccgaaattacccgccgctacggtttcgacaaaccgctgcatgaacgctatttcgacatgctgtggcgctacgcgcgcttcgactttggcgatagcctttttcaaggggcatcggtgatgcagttggtaaaatccagcctgccggtctcggtcagtctgggcctgtggagcacgctgattatctacctggtgtccatcccgctcggcatccgcaaagcggtcaaaaacggcagcgccttcgatatctggagcagtacggtcatcatcatcggctacgcggtgccgtcgttcctgttcgccattatgctgatcgtgttctttaccggcggcaactatctggactggttcccgctgcgcggcctgacctcggccaactttgactcgctgccatggtatggcaaaatctccgactatctgtggcacatcacgctgcctgtgctggcaacggtgattggcggcttcgcgacgttgaccatgctaaccaaaaactcgttccttgatgaggtacagaagcagtatgtggtcaccgcacgcgctaagggttggatgagcgcaaaatcctttaccgccacgtgtttcgcaatgcgatgctgttggtgatcgccggttttccggcaacctttatcagcatgttctttaccggttcactgctgattgaagtgatgttctcgctgcacggtcttggcctgctgggatacgatgccacgctacaacgcgacttcccggtcatgtttggcacgctgtatatcttcaccctgattggcctgctgctgaacatcgtcagcgacatcacctacacgctggttgacccgcgcatcgacttcgagggacgtcagtgatgaagcttaacccgattaaccgcgcgcgttgggctcgttttcgccagaaccctcgcggtttttggtcgctgtggatattcctgcttattctgctgctggcgatgctgtcaaacgtgctggccaacgagaagccgctgctggtgcgttatcaggggcatttctatgtcccttttatggtgaactacagcgaatcgacctttggcggcgaactgcaaaccgccactgattatcaggaccctttcgtggtgaagcagcttgatagccacggctgggttatctgggcaccgctgcgccagagctacaactcgataaacttttcgacccaacagccgttcccgtcgccaccgtccacgcaaaatctgctcggtaccgacagcaacgggcacgacgtgctggccgagatcctctacgggctgcgtatctcgctgctgtttggtgccatgctcactctgctatcgtcggttatcggcatcgtcatgggggcgacgcagggctattacggcggcaaaatcgacctgtgggggcagcgctttattgaggtctggtccggcatgccgacgctgtttcttatcatcatgctctcaagcgtggtgcagcctaatttctggtggctgctgctgataacggtgttgtctggatggatggtgctggttggcgtcgtgcgcgctgagttcctgcgcacgcgcaattttgactatatccgcgcggcacaggcaatgggcgtcgcagaccggaccattatgctgcgccacatgctgcccaacgcgatggtcgccacgctgacatacatgccgtttattctctgcgggtcgattactaccctggcttcgctagactttcttggctttggcctgcccattggctcgccgtcgctaggatcactgctgttagaaggcaaaaacaatattcaggcaccgtggctcggcatcagcgcattcttggtgcttgccgtcctgctgtcgctgctgatttttattggtgaagcggtacgcgacgcctttgaccccagccagacccgttaggaaggccaacagatgccacattcgccgctgctaagcattgataatctggatatcgccttcaggcaggacggcaggctttctcaggtcgtcagtaatctgtctttgagcatgaacgccggggaaacactggcattagtcggcgagtcgggttcgggaaagagcgtcaccgcgctgtcgatactgcgcctgctgcatacccagtcggtggtttatccgcagggcgatatccttttcgagggccagagcctgctgcatgccaccgaggcgcacctgcgtgagactcgtggcaatcgtatcgcgatgatttttcaggagccgatggtttcgctgaatccgctgcataccattgaaaaacagctcgccgaggtgattacactgcaccgaggcctgcgtcgcgaggctgcacgcgcggagatagtgcagtgtctggaccgcgtaggcatcgcgcaggcagcctcgcggctcggtgatttcccgcatcagctttcgggcggtgagcggcagcgcgtgatgattgccatggctatcctcacgcagcctaagctgttgattgccgatgaaccgaccaccgcgctggacgtctcggtgcaggcgcaaatcctcaagctactgcacgaacttaagcaggaactgggcatggcgatgctatttattacccacaacctgcgtattgtgcgctccatcgccgataacgtggcagtgatgcgcgccggagaatgcgtcgagtacagcagcaagacggcgctgtttgccgcgcctcagcacgcctacacgcgtcaactgttacaggcggagccaaagggcagcccgttaccggtcaagcctgacagtccactgctgctgcgcgtggagaacctgagcgttgggttcccggtacgtcgaggcctgctccgccgcaccgtcagtgtcaagctggcgctggacaaactcagcttctctctgcggcgtggggaaagtctcgggctggttggcgaatcaggctcgggtaaaagcacaaccggacttgccctgttgcgtctgctccattgcgaaggaaaaatcgaattcgacggtcagccgttacataggtttaatcgccgcgccatgctgccgtttcgcagtcgaatccaggtggtatttcaggacccttattccgcgctgaatccccgcttgaacgtgatgcagattatcgccgaagggcttatggtgcataagcgtctgacagaacaacagcgtgaggagcaggtgattgccgcgatgcgcgaggtggggctggatcctcagacgcgtcaccgttatcccaccgagttttccggcggtcagcggcagcgcattgccatcgctcgcgcgcttatcctgcaaccggagctggttatcctggacgaacccacgtcatcactggacaaatccgtgcaggcgcagattctcgagctgttacacaacctgcaacaacgctacggcctgtcgtatctgtttatcagccatgatttgcacgtggtgaggagcctgtgccatcaggtgattgtcttgcaaaaggggaaagtggtcgaacaggggactgtgaaaagctgtttacgcggcctgaacaggcctatacgcgtgaattattggcgttagcagaagcaaatgacggtcagcagcgttagccaacggccattagaagggataaattgcggagacggaaaccgattcggcgatggcggtgccgatgtttttcaggcggcacatggtggcgctctcgtcgtcgcgtttaacaaacaggcacagctcgccttcgcactcgacgatgttactctcgacctgaatttcgcgtaaggagaggttcaggctctgtagcacctggcgggcgctgtccccttcagggctgagcagcttcaggccgaccaagttgctatcctcttcgtctgccggcagtgaaatagcttccactttgatgcccgcaaaaccagaaagccagcggtaactctgtggcaaacggtggacgacggaaaaatgattggtattcacaatactcccaagaaatattcaacaataaatttacaaaattgcaactcatgaaccaaggtataacgcacaatccgtggttttgcctgataaatagttaaaaaagaagccactatttacatgacattaaccatttaagtacataagcggtacattatggcgtttttttgaccaccagcttgtgtttttgagatctcgatctcacttcgagtcatttgtaaccctttccgaatcatttctcaaccaatttcattcatcgccgttaccttttagacgccataatgtcacaaaaaacaaacaaaccgaggtggtaaataaatttaaaattatacttatcaatatcttgtacgtgttacatttggttaataaaaaacgaaccaaaaggttcattacaatttggacatttcgccctttttagcctaccaagtgttactaaattgttaatcaaaatccaaatgaaaacagaatgttattttttagcacgatttgttagcgctttttggcaaatcagggattatcatccacaccgtttttactggattactctatcaatgaggcaaagaacctcttaaagaggcccccagcttctgcgtaacctgataaaaaataataacttttggcaagccgcaggcttattcccccttcctttagagaaatgtgatggacaaaaaacgttcactttttgacgaaaacacccaggaaaatggtaccggtttcagtcgccgcgacatgctaaaaggcgtgggttcggcgatggttgctgctacccttttgggctttccgtttttaacccaggcagaaacagacaccgcaaccggatcaccggttatcttcacccagttctttattgtttctcaggcgattaccgagcatcaggacctcagtccaggcatgtctgcgcgtatcttcaacgccttctatcatggcaatccgcagtttgcgacgcaggtgaccaaactttatggtctgctgcagcctaaccagcgtgcaaaacagtttcaggaagtcgcgaaacaaaatggccttggcgatgtgctgaccagcatcatcaccggctggtacacaggcacgattaagaatggtaccgataccattcttatttcctataaagatgccctgatgtatcgcccggtaagcgatggactgattgtgccgacctactgtggcaatggcccgctgtggttcaccgccccacctccggccgcccgatgccggaatatatgaaagaagaacgcttaaaagcgacgcctgatactgttaatacgagcaaagcatgatgaataaacctacttttaccgcagacggcgatgcgtctgctgacgttattattgttggttcagggattgttggcggcatgattgccgaccaaatggtcagcctggggcattccgtgctggtgctggaagccggtctgcgcatcgagcgcgcacaggccgttgaaaactggcgtaatatgccgtttgccaaccgtgcaggctcagactttcagggtctgtatccgcagtccgagctggcgcctgctccgctctatttcccgaaaaataactatgtgaatctgaccggcccaagcgccagcagcttccagcagggctacctgcgtaccgtcggcggcacaacctggcactgggcggcctcgtgctggcgtcacctgccaaacgacttcaagatgaaaaccctgtacggcgttggccgtgactggccaatttcctatgaagagctggaaccttattactgccgcgcggaagaagagattggcgttgcgggcccaagtgacccagcgttgcagtccccttcccagcgcagtaaaccttatccgatggagcaggttccttacgcctatggcgatacccgcttcgcggaagtggtcaatccgcacggcttcaaatctgtccctatcccacagggccgcagtacgcgcccgtggaacggtcgcccaacctgctgcggcaacaacaactgtcagccaatctgccctattggcgctatgtacaacggcattagccacgtcgagcgtgcggagaataaaggcgctgtcgtcctggccgagtccgtggtttacaagattgataccgacgaacacaaccgcgttaccgccgtacactggctggacaacaaaaagcagtcacacaaagcgaccggtaaggtcttcgcactggcctgtaacggcatcgaaacaccgcgcctgctgctgatcgccgccaacgagaaaaacccgaacggtatcgccaactcttccgaccacgttggtcgcaacatgatggaccactcgggcttccactgtacctttatcgcctcagaaccgctgtggattggccgtggtcctgcccaaagcagctgcctggttggcccacgtgacgggaattccgcagcaaatactctgccaacaaaatgatcgtcaataacatcagccaggtgatccctgccaccaacaaagcgctggagatgggactggtgggcgaagagctggacgccgagatccgccgtcgctcgatttatggcgtggatctctccatcagcctggaaccgttgccggatcccaataaccgcctgacgctcagcaagacacgtaaggatccgcacggcctgccttgtccggatatccactatgacgtgggcgattatgtgcgtgaaggtgcagttgcggctcacaagcagctggaagaaatcggcaagctgtttatggccgaagatttcaacatcaccaccagcctgaacgccaataaccacatcatgggtggcaccatcatgggcaatgacccgaaagattcggtggtcaacggcgactgtcgtacccacgaccacgaaaacctgtggctgccgggcggcggggctatcccttcttcgagcgtggtgaacagcaccctgacaatggcggcactggcgttgaaagcggccgatgatatggcgaaatctctggcaggtacggcatgaaaaaattactgagtttaggcctgctgggcgcggcgcttagcggctttacgggcatggcatcggcacaggacagccagcttgacctgattgccaaagggaaactggtcgcgacggcggccgactgtcaggcttgtcataccaatccggaaggcggtaagccttttagcggcgattacgcgattcactcgccgatgggcacgatttataccaccaacattacgccgtcgaagcagtttggtatcggcaactatacgctacaacagtttagccgcgcggtgcgtgaaggagtgcgtccggacggtgaaaatctttatccggcgatgccctatacctcttacagccacatgagcgacgaagatattcaggcaatgtatgcctatttccagctcggagtaaaaccggttgaacagccaaccaagccaaccgcattgccgttcccgttcaatatgcgcatcgcgatggcgggctggaatctgatgtatctggacagctcggcgttcaagcctgacccaaccaagagcgagcaatggaaccgaggcgcgtatctggttaacggcgcaggccactgcgacacctgccacacaccgcgtaatctgatgatgggcgaagtgaccagcaaaccgctggctggtggcatggtcggtccatggtatgcacccaacatcagttcagatccgataagcggtatcggtaactggacgcaggcacagctggttgaatacatgaaaaccggtcgcaccttgggcaaaaaccaggcggctggcccgatggccgaggcggtgcaaaacagcctgcaatacctgccggaatccgatctcaacgcgatcgctttatatctgaaaaacagcacgccggtgcgtgaccctgccgatcaaaaggcggccgacagctttggttcgaaacaggttaacgtagaagagggtctgcgcggtgcgcatccatccaacgctaataacaccattatcggcggtgcggccctgttcagcggctactgcgcgagctgtcaccagccggacggcggcggcagtaaaaatcaggcttatccgtctttgtataacaataccgcgaccggcctgaacaacgcgtccaacttgatctcggcgatcttgtacggcgttgaccgacaggttggagatcaacacgtgctaatgccgaaattcggcgaaggttcgtacgtagggcaactgaccgacgcacaaattgccgacatctccaactatgtactgaccaacttcggcaatgcggatattcaggtgacctcacacgacgtggccgtgctgcgcgccggggtccagttacgctgctcgctaagctacagccgtttatggcaccggcgatgggagtgggtgtgattatcgtgctggcgctgattttctggctgttcagcaggcgtaaaaaccgccgtcgctgatggccggttgagacgtaaaaaaaggagagcgccagtggcgctctcctttttatttgtgccgtatatgccggagaactagccgcgtccgacaaacggcatcgcggtggccatcacggtcaaggtcagaatattggtgccgtcaggctggttcgccataaacgccaccgcttcgccgaccttgtcggccggcatgacaggttcctgcgccaattcgaaatctgcctgaagcctgccgcttaatgccttgttgcccatatcagtcgcggcgttgccgacgtcgatttgcccacaggcaatattatagcgacgaccatcaagcgaggtgctcttggtcaggccggttatcgcgtgtttgctggcggtatacgccgccgaaaaaggacgcggcgtatgggccgagatagaaccgttgttgataattctgccgcccatcggggtttgctgcttcatcagcttgaacgccgcctgcgtacacaggtaggcaccgttcagattggtgttgatgaccgtcaaccagtcctcgtaaggttggtcctcaatcggctgttccttgacgttggtaccggcgttattaaacagcacgtcgaggcggccaaagttttcctgaaccgttgaaaacagcgccgacaccgaatcaggactcgtaacgtccacggtcaacgcgtgcgcctggccgggcgcaaactgcgcgacggcctggctgagcttttcctggttacgcccggtcaggatgaccacaaatccgctggcggccagtgccttggcggcgctcagaccgatcccgctgcctgctccggtaatcagggcaatcttctttccgttatggctcataggttttccaaaaatcagtctgggctacgcgttacaccgcggccatcatgccaccgtcaacaaacagcaggtgaccattcacaaaatcagaggcgcgtgaagacaggtaaactgcggcgccgataagctcttcagggttgccccagcgcgctgcgggggttcgcttgcacagccagtcggagaactctttgttgtccaccaacgcctgcgtcatgtcggtcttgaaatagcccggtgcgataccgttcacctgaatattatagcgagccagttcaacgcacatgccgcgggtcagcattttcaccgcccctttagaggccgcgtaaggcgtgatggtatcgcgccccagttcgctctgaatggaaccgatgttgatgattttgccgcgttcacgtttaaccatatagcgtgcgacggcctgcgaaaccaggaataccgacttttggttgacggcgacaatgtcgtcccagtctttttccgggaattctgtgaatttatgacgacgctgaataccggcgttgttgaccaacacgtcgatagcaccaatctcacgctcaatcttgtcgatagcgtcgttcaccgctttgctatctgtcacgtcgaacgccacaggatgggcaatgaatcccgctgcgcgcaggctctcagcggccttgctggccgactcctgcgtcgtgctgttgataatgatttcggcgccgtgttcggccagcccttttgccaacaggtatcccagtccgcgtgatgacccggtgaccagaatttttttgttatccagcgagaataagtttgtcattacgattttcctgacgttaccgataaaagtgttcgtgagacccacgacccaggcgaaaaaatttatgtcattcaatcaaagcggtttacccgcccgcaaactgtgatgcagatcacgctacagggtgttaagaaactctgttaccgcaagcgtgatccgggtcatccgccccgttcttcttaagcgaaattctgcttaggtattggcctggggaaaggcaacaagatgttacatcatcatgaaaatgaaagttttttgcttctgctgctcacgttgttaagagttagccaatttggtaacataaacaccatgttacccgcccattttggactcacaggcaccgcatgagaaaccagcgcgtcacactgcaggacatcgcgttactcgccgacgtcacgaaaatgaccgtcagccgttttctgcgtacgccagaaaaagtgtcccctgagacccgcgagcgcatcaccaaggtcatgcaggaagtcggcttcccgttggaggaggctgaaaaaaagagcaaaagcaaaaagataggaattttagtcccctcttttaacaaccagattttctccgatctcctggcaggaattgagtccgtgacctcggcacagggctaccagacgctggtcgtcaactacgactacagcaaggagcgggaagaagagcacatcattaacctgctgacctaccgtctcgcaggtctgatcctcaccgactccgtgcataccctcaaggccgacaaatatctcaatgccgccgatatcccggtcgcgcaggtgatggatctcgacgacgcacacggacgcatcgccgtcggttttgataattttcaggccggatttgacatggcgtcggcgttaattgccagcggcaaacagcacgtggtttattttggttcgatgtccgaccctcgcgatatgaaacgctacgagggatatcgtaaagccatggaaaataatcagcttacgccgcaacacattaccccgaataaggtctcatcggtctctatcggtgccggtatgctgaccatggcacgacagcttaatccgcaggtcaatgccgtgctctgcaccaatgacgatattgcggtgggcgttttacaagaatgtattagactgggtattcaggttccccaacagatggctatttccggcttccacggactggatattggcctggcaaccacgccagccttagccagcgttattaccccgcgctttgaaataggcaaagtggccgcggaaataatgctaaagaaaatcaataaaacccctacaattgaaagagttgacctgcattatcgtatttctctcggcggcactatttaatcctttctcctcaagactcttgtcccgccagcacggggcaggatcacgttaccagtaacatccttttttaacatgatctaacgtgacatgagtcacaaaatataatggtggaaatgcttttattaaggcatcgccggatcaggttaataagagcattttctccaatgacttatttaataaaccaaccgaattcgtgcattaattcattcctccgcaggaatgcttctgtgtataaacgaggtgcaccatggataaaaaaatacctaaagcccgttggttacgcgttattacgccaatattaatcgcctgcattatttccttcatggaccgagtcaatatcagctttgcgatgccaggcggaatggacagtgccttgggtatttcgtcctcaatggccggactggctgcgggtattttctttataggttacctgttcttacaggttcctggcggcagcatcgccgtacacggcagcggcagaaaatttattgcctgctcgctcgttgcctgggccgttatttccgtgctgaccggactggtcaccaatcaataccagctcctgttcctgcgcttcgccctgggtgtcgccgaagggggcatgctgccggtggtgttaaccatggtcagcaactggtttcctgacgcagagcgtggtcgtgccaacgcctatgtgctgatgtttgccccgatcggtggaatgattaccgcaccgttgtcaggttttatcctcaataccctcgactggcgctggttgtttatccttgaaggtctgctgtcggttgccgtgatgctgttctggtggttcaccatcagcgatcgtccagaagaagccaaatggctgtctgagcgtgaacgtcattatctgattaccgagctaacccgcgaacgtgaggcgttgaaagagctggcaccggttgagaatgcgccgctgaaagaggtattccgtaataaatctattcttaaactgattgtgattaacttcttctatcagaccggtatttacggctatacgctgtggctgccaacgattctgaaaaccctgaccggcggcaatatgagctcggtaggtatgctggcgattattccttacgttggcactatgctgggtattttggcgatgtcgctgctgtcagataaaaccggtaaacgtagaatgttcatcatcctgccgctgctgggattcgccgcaagtctggcgttatcggtcgcgtttaagggcaacgttttcgcttcttactgcttcctgatttgtgccggtttcttcctgcaggccgcaaccagcgccttctggaccattccaggcaaagtcaccacccctgaagttgcgggccgcgcaaggggtgttatcaatggattgggtaatctgggtggcttctgtggcccgtatctggtgggtgtactggtaagcctgtatggccagagcacggcgatttatgccctggttgcctcgttgctgattgccgcgctggtcactgccctgctgccgaaagagtgtgatattgcactggtgccgggggcgaaggctatcgcgctggcggagcattatgcgaggacgcgggctaagtacaaaactaatggggtagcggcttaagctttgttttattgcgctgcgcgcggctgcttctgggtcaaaagcacgtgccttgcacgctggccgctggcccgaatccgccaaccagcttctaaacaaaaatcggcaaccttggggtccaatccatgcacggtctaacggcggaatcttgtgtttttctttattgcctcggcaactgctcagggatgatgtcttctctacggcggattcacatcaaaggaaaacatgcggcatctcaaatggccgccgtcagaaaccgcccttattccgggcaggcaaccccaaaggctgaacaaggttttacttaagagtccattggcgggttcagggcacccgcccactataactctctatgagtttactgccgattcagcaacaaccttcgccggcctgctggcataaagataaagcaacaccgaggcaataatacaaaacgccatcgacccaaccatcggccaggcgctgtgcgccgggaacatcgacaacagcgaaccgaccagcgcaccggtaccgaaacgaatagtgcccgccagcgaggctgcggtaccggccatgtgcgggaagtcatccataatcactgccatcgcgttcgaggtcaccatcgcaatgcagccgacgtaacccgccacaccgagcaccagtgcccagaaacccaggccgaaggcgctcacaaccagcaaccatagccccatcaccaactgaatcatcaggcccaaacggaacattttgatagccccgagacgacgtacgttgcggctgttgaaaaaggtcagaatcaccaggaacaccacgttcagcgcaaaatagaagccgaaatgctgaggcgaaacgccgttaagttcgatataaacaaacggaccggcgctgaggaacgagaacatcccggcgaaggaaaatccgctcgccaacatgtagctcaacacacgcttatggcggaacagcgacgcaaagttacccaggctggtgcgcatatgaaaacgctgcctgcgttctttggggagcgtttctttaataaacaccccgaccaggaccgccgcgatcagcgcagcaatggccatcgcccagaagatggcatgccagctgaaccacagcatcagcgcgccacccagcattggtgctagcaaaggcgcgaccgtcatcaccagcaccacgaaggacatcattcgcgagaattcgtccttcgtgaacatatcgcgcatcaatgcgtttatcactacgctcgccgccgcagccgacaggccatgaaggaaacgcatgttcaccagttgatgaacggaatcagataacgcgcaggcggcagcggcaatagcaaataccagcacgccccagaagataaccggcttgcgacccagactgtcggccatcggtccatagaacagctgaccgatagcaaaacctaatacataagcactcagcgtcatctgcacgctgcccgctgaaacgccaaactcttgagcgatcatcggcatgctgggtagatacatgtcgatagccaacggcatcaacatcgacaacaatcccaatatcaagattaaacctaaatgggatgtccgggtctcttgcactctttgtaactcctgattaaacgacgagtaaaatttttggtttaacgtggcacgacaactgaagcgatttcttcttcggtgagcggacggtattcgccaggctctaaatcttcgtccatcacaatctcgccaatacgttcacgatgcagctcaaccacacggttgcccaccgcagcgaacatacgcttcacctgatggtaacggccttcactgattgtcagacgcaccacgcgatcgctcacctgttccagtaccgcaggtttggtcagtgagtcttcgttatgcagttgaacaccggcggtaaactgctcggcggtatcgtcggccagcggatgctccagcgtgaccagataggtcttctcacagtgatgcttcggcgaggtgatgcggtgcgaccactgtccgtcgtcggtcatcagcaccagaccggtggtgtcaatgtcgagacggcccgcagcgtgcagcttgtaggcgaccggttcttcgaggaagtaaagcacggttggatgatcagggtcgtcggtcgaacagacgtaaccctgtggcttgttgagcataaagtaacgatgaccggtgatctgctccagcacgttgccgtcaaactcaacggacatctccggggtcagtttaaatgccccggtcttgaccacttcaccgtctacggtaacgcgctttgcacgcagttcgcgcgccactaacgcacggctcacacctaactgttgtgataaaaacttgtccaatcgcattgaatctactcagcctttcctggcgaacgttttctgctcgcactttgataaaacacaacaccccgccaccgcataattctgcgacagcagggtgatgaaatggtgatatgtaataatttctaaaggttattattactttgcggaggtaaaaccggcagccgagccgcctttaagagccgatattatagcggggcttctcccgccttgtcgcgtcaatctgtaaaagttagcagactaaattttaacgcaacgtgattgaccctcggttcgccttccgcgacgattgttggcatactgaaatcaggtccctctcccccacagaacgtttcggaaatgtcatgcaagctctcccatttaccctccgcccctatcagcaagaagccgtagacgctacgctgcagcattttcgccaacgcgacgagcctgcggtgatcgtcctgccaaccggcgcaggaaaaagtctggtgattgccgaactggccagggtcgcgcggggccgcgtgctagtactggcgcacgtcaaggaactggtcgcgcagaaccacgctaaatacctctcatacgggcttgaagccgacatttacgccgcagggcttaacatcaagcagagtcagggcaaggtggtcttcggtagcgttcagtcggtggcacctaacctcgacaagttcgacaacgcgttttcgctgctgattatcgacgaatgccaccgtatcagcgacgatgacaacagccagtatcagcaaatcattgcccacctgcgcacccaaaatccgcgcctgcgccttcttggcctgaccgcgaccccgtatcggctgggtaagggctggatttatcagtatcactatcagggcatggtgcgcggcgatgagaaaagcctgttccgcgactgtatctatgagctgccgctgcgctacatgataaagaatcagttcctggtgccgccagagcgcctcgacatgccggtggtacagtacgacttcagccgtcttcagcccaacagtagcgggctgttcgccgaggcagacctcaatgacgagctgcgtcgacaggcgcgaatcacgccgcacatcgtcaatcaaatcatcgacttcgccaaagatagaagaggcgtaatggttttctgctcgacggtagagcacgcaggcgaggtgttcaaactgctccctgccggtgaagcggcattggtcagcgcacaaaccacggcacaggaccgagaccggttgatcgatgacttcaaacagcaacggttgcgctacctggtaaacgtttcggtgctgaccaccggttttgacgcaccgcacgttgatttgattgccattttgcgcccgaccgagtccgtgagcctgtatcagcaaatcgtaggacgcggcctgcgactcgcgccggacaagaccgactgcctgattctcgactatgccggtaatccgcacgacctgttcacgcccgaagtcggcagccataaaccggccagtgacaacaaaccggtgcaggtattttgcccggcctgcggctttgccaatatcttctggggcaaaactaccgccgatggcacgattatcgagcactttggccgccgctgtcagggcatcctcgaagacgatgacgacaaccgcgaacagtgcgacttccgctttcgctttaagagctgcccgcactgcggggcagaaaacgatattgctgcccgccgctgtcatcagtgccaggaagtgctggtcgatcccgatgacatgctcaaggccgcgcagaagctaaaagatgcgctggtgctgcgctgcggcggcatgaatctggagagcggtaaagacgataaaggcgagtggctgaaaatcacctactacgacgaggacggcgcgagcgccagcgaacgttatcgcctgcaaaccccggcgcagcgcacggcttttttacacaactttatgcgcccgcatcagcgcgcaccgggcattgagctggtgtggcacaccgccgccgatatcatcgcccagcagtcgctgctccgacatcccgattttgttgtcgcaaggatgaaaggccggttctggcaaattcgcgagaaaatcttcgattatcagggccgtttccgccgcgcctacgagctgcggggctagcggtttaaggcatgatcagggattaatcatttgctgtacgggcaatacttcggtaacataccccccgctttcgccatgcgcgaagcgaagatctatcacctgttgctgggtcgcctgtaacagtaattttcttttaagagaaaaatcatgactactattaatgcacaagtacgtactgcgcagggtaagggtgcgagccgccgcctgcgcgcagcaaacaaattcccagctatcgtttacggtggctctgctgaacctatctctatcgagttggaacatgactctgtaaagaaccaggaactgaaagcggaattttacagcgaagtaattactctggttatcgacggtaaagaaaccaaagttaaagttcaagctgtacagcgtcacccgttcaagccaaaactggctcacatcgacttcgttcgcgtttaatcgctaactgagtagatgcgcatagggacgcctaagcgagaacaataaaaaacgccgcattatgcggcgttttttattggctgaaatctgggggtttagctgttaccgctgcctgagcggcgctgcagctggtcgcgcagatttggcggtgtccctttgatagtcagcgtatcggttgccggatcccagaaaatacgctctcccatcagcagcgcgtcgaagttgatgctcaacccgccaccgctgccggcaaacttcgttaactgacgcagcgtgctgcggtccgccggaaaactctcttccagctcgtaaccctgttcggtcgaaaactgcttgaagtccttatcgcctaaaggcggtaattcctgcgccagctcctgcaaggcaatctcttcgcccgcctgcagctggtcgttgcagtaggtatacacctgctggcgatagttttgacgctcgtttttatcgagctgagcttctgcacaataatcatcaaccgcctgcaacagcccacggttctgtgccttagtgtccagcccttccgatgcgcccaggaaatccatgaagaaatccgagactttgcgtccaactctgcctttgaggaaggtcagataacgggtggattccgggttagtttcccactcggtcaaatcgatacgcgccacaatgtcggcgtgattgatatccagataatgaatgctgctgacgtcaagctgctcgttcacgcgcatgctgctgcggctggtcaatacggcgaccagcagatactcgaccgccagaaaacggtagtggcaaaacagcaccacgccgccttcggcaaagggatacttcgccagctcgtcgcgcagacgaccggttgccgcacgactgaaccccagaaagtcttcgtcacccttgcggcatgtgcgcagtgcggcagccagctcgctctcttcgttaaacagaccataagccttgctcttggcgctgtaaacgcgatgcagctcggccatcatctcctctaccgccgcattcggggttaaaagggtatcgcgcagcacaacatccagcgtttgctcgtcgcgtttgttcaactggtgcagagcaatctgctcgatatccagactcatgtgactttctcctgttcgtttagggggttcccctgcgccgcgtattccaacaccgaagaccgctatctgcaagcgttaacccgcgtccctgaaatctctgctaacatgctcaaacaataacccagcgttattagcattataaaaatgcggaaactcgtggcgcgataagttaagatattggactttgtaaagctttgagcacaattatctatgccacaatcatctcgctacagtgacgaacaagttgaacagctcctttccgagctggccaccgttctggaaaaacaccgcgccccaaccgatctgtctctgatggttctgggcaacatggtgaccaatcttatcaataccagcgtcgctcccgctcagcgcaaagttctgggacgctcgtttgccgatgccttacaggcatcaataagagaagataaagcccattaattcatcatttaaaagttagccaatcctcttatggtgacaaatagcccgcgctatcgcgaaaaagtatcccagatggttagctggggacactggttcgccctcttcaatattctgcttagtctcggactcggtagccgctacctatttgtttctgactggccctcctcacttgaaggcaggatttatgcgctggtcagttggctaggtcattttagctttgtcggtttctccgtttacctgctgattattttcccactgaccttcgtggtaatgtcgcagcgtttactgcgcttcctctccgccattctcgccacgaccgggctgaccctgctgctggtggataccgaggtgtttacccgtttccatctgcatatcaatccggtagtgtgggaactggtggtgaaccccggccaggctgaactggcgcgtgactggcagctgatgttcatctgcgtaccggtcattttcctggtcgagatgttatttggtacctgggcctggcagaagctgcgcagccttaaccgacgaagctttgccaagcctttggtcgtgctgtttatctgctgcttctttgcgtcgcatctaatgtatatctgggctgatgccaacttctatcgcccgattaccatgcagcgctcaaacctgccgctgtcctacccaatgaccgcgcgcaagttcctcgaaaagcacggtttgcttgacgctcaggcgtaccagcagcgccttatcgaacagggtgaccccgaggctatctcggtcgaatatccgcttaataacatcagtttccgcgataaaggcagcaactataacctgctgatgatcgtggtaaacggcttaaacgccaacacaacggccaaatacatgccagagctgaaccgatttgcgagtcagaacgtgaactttacgcatcatttcagctcaggcagtcaagatgataccggcctgtttggcctgttttatgggatctcgccgacctatctcgaagggattatcacctcgcgtaaaccgtcggcgctgatgaatgcccttacccagcagaactatgagtttggcctgtttgcctctgataacttcaacagtccgttataccgtcaggcgctgctctccgacttctcgctgccagccgcggtgcgtcaaaccgatccacagaccacccaacagtggcaacagtggctggcgacgcgcggggcacgtccgtggttctcctatgtgagctttaatggcacctctgatgcaaacctgccgaataaagaaggcaagcaacctaccgtcgcgactatcaatcgtcgttatcagcagggtgcggcagaagttgacggacagatagcggaggtccttaagagtcttcaggacaaaggcgtgctggataaaaccgtggttgttattaccggttcacgcggcgtggatctgaccagtcagcaaaatcagatggacgccgagcagattcaggttccgctggtgatccactggccaaatactccggctcaaacagtcagcaagcttaccgcccacgaagacgtgatgactacgttgatgcagcgcctgctgcacgtgagcacctcgccgtcagattattcacagggcgaagacctgtttgctgcacgacgcaataacaactgggtatcaagcaccagcgatggtgcactggtgattaccacaccgacgcagactatccgtctcgataacaacggtaattaccgtgcctacgacagccaaggcaacgagcttaaagatcagaagccggaactgggccttctgcttcaggtattgaccgatcaaaaacgcttcgtggcgaactaactgcttaaaattgaagcagtcgtgagcgtagcatattgatttcaaagtcgggatgagtagactgtttgtacagcgtcggcatgtagcgcagcctggtagcgcaccgtcatggggtgtcgggggtcggaggttcaaatcctctcatgccgaccaaacattcccttaaaaaccaacctcctggggttggtttttttatgcctgaaatttgtgtggtgtaaaactggtgtaaaaccctactttcaaaataccgagcaatcatcttgttcaatcatgttggcgtcattgatgatgtacatcacgactctccatacggtcgtcgcgcttctcatcgacccgttgaactcacaactcaaagctgcctgtcatgcctgcttaaaatcagtcttacgtaagatagattccgttttccaagcggcccctctactaagacggcgcaaacaaggtactgttttgttttaacaaacaattgtctcgcagggcgagggtgatattgataaatcttttcagaacggggcggctacgccacggcgccagtaaccgacagagccatattaaggataagttggcaccccgatgcgcaagcgcatgaaaaactctattaatcataatcttaataaaaaatatatgaaaaaattaagtatgttgaacgttcagttatggcgaataatggataatacccggagaaatattaagcgtagaaaccgaggctcttgtaagtatcccctcaaaatgctccatttccttttagatatctgccgacatagtctctcggtttcaagaatctagatcttacttatgcccccctttttcaatcacaattactgcgtccttttctagagttattccggtagtttatcgttcatgtttgataatatttatctatggaagcgatcctaattccgacccaaatttcgatctattcattaaagctcataaacgtatcaatgctcaactgtttagggttaactacctatctattaaaagtattttagatattaaaaggaattaaaatgcatatattaaggcactttcgaacgttgttatatctccctttattattcctctctgcctgtacgacgcaaatcaagaatgcgcagaatgaagcttctcttcaggccctacctgcgccaatgagtgtcaattgtcccgcaggctgcccggcaggaggcagtattcagactattacccgcgaagcttatacattgaacaacaatcccgacacgaagtttgccaactgggtcgcctatacgataaccaaaactagccaggcaagccgtcgaccccgtaactggaaacgcgatcctgctctgcccgaatccgatactctttctcccaccgcatatacaggcgccaacggtgcactcgccgtagacctgggccatcaggcaccattggccagcctgggcggtacggctgattggcagtcattgaactatttgtcgaatatcacgccccaaaaatcagcactcaatcgaggcccatgggcgaggctagaagataaagagcgcgctttggtcaatcaggacgagggcactgacgttcactccgttaccggcccgttgtttgagacagctatagctgttttacctgcggcatctgcagtgcagatcccaagcggttactggaaagtaatcttcattggctctgggccggacaagggaaaatacgccgcgtttctgatgaatcaaagcgtttccaggacagccaacttttgtgattatcaggtcactgtcgaacagattgaggcgaaaaccaatccccatctgaatatttggtcttccctgccctcagatattgccattgaggtcaaggcaatgaaaggaacactggctaaagactctatggggtgtcagtaataaatacattctggcaggcattaaaggtgctgtaagtatcaagctaaatcaaccttgactgataacctaattaatttttggtctgctagtgacattttaacgatgcgaatagccggaaaaaacgttgggcgtgaaaacgcgctgagggccgctgtatgcgtattattccatgtagcgccatcatcgtaaggagccaccccgctaggcacaactagtgcaatataatgctccaaccatctgatctaatattataaaatattttgtcaatcagttggttgtagttctcctttctgaattttctccagacggtcgatcatcattttattatcatctgaagggccaaaacgtccattatgctacttcaccttatctgagccagctcggtcaatctttgccattgtcatgtcagggtgctcggaaaacggacgacatcccacgttaagccttttagacaagtaagtgttgacggggagcttcgtgccaagagcggattgcaggtcggattaatacaattagcgcaattcttttgagaaacagaccgcttctgtcctacctatgtaggggccgtaattctcgatgcgtatatatccatatttctcgtagaaatttacagcccgcttgttgatgtgtcgagtttccagtctgagttcgctatatcccatctctttcgcagatgtttccagaaaagcaagtaaagctctcccaacccccggcacacttcggtctgagaacattcttttaagctcggctatgttttgcgttaacggccgaatcgctccgcatcctattacatcgccatgagcattctttgccaatgcccataaggctttgtcatcatacattgcttcaacggcgaaattgcttttgccgttatcacccgtaatagcggcaagttctgctgacagcatttcgattaagcgatgggattctgaagaaaatggatctgacttctctacggttatcatgttcatatcctgcaaaatgaatgtgaccagcataaagtatcctaccaagtaaagcatcagcctgaaacaattgacggaataacagcgttcacacactatcgcagggatgttatgtccgctgttcgctcaaagctgcaggggcgaggggcagcaaggtgccagtagcggacgttactaacgcaacggtgagttaaaaatacggggagctgttcattcctttaaagggacaggtatcgcaataaataaacgggtgtattggattgccagttgaagcctgaagatgtccctccctcaggatgggcttcggccaaagggtttgtcgccagatagcgtaaaactatctaaactatatttttaattgcgtctttaaatttagagaaaataacgtattccagaaaaatgacgatgatagtggcgagttcttctattggcattgccacccctgaccatactgacaagttataaaaaatgtaaaacgaaacgcttataaacagggtatgagagtagtatataaacattgaaaagtttctttcttttcctgaaaatatttcaacatcatttctcttaaggcaaacaatgaaaattgccaaagctaacaatggtgaggataccagcatatcagaagatgtaatgaactggttaccgcaactctttatgacatgcgtccaaaacaatgactcgagcgcagttaaaattaagggaactatcactaaaatctttaaatttatttttactttatggactaaatcttcactttttgccaaaataaagccaagaaaaaagttagggatcccaaagaaaatgccgttcctgtagaaaaaaatattggggttatctctcaaaataaacagccagttaagaacaacgccagttaaccaaagcattattataataaataccgttaatttaatatgcctgactattttttcttttactatgaggcaaaccagtgcagataatagtaatgcaggtatataccatagatgggcaaccccggttatctctccccttaagattaaatatattttcctaagagttgattcattttgtaattttaaaattggagtcagcgtgtagaaataaattacagaccatattatgtacatttttattatgtggctaaaccatctcttggcatttccgttattaattgttcttaagaaaagatagccactgactataaagaaaaatggaacggcaactctaaacaaaccatttttaaaaaaacctgataaataatcgttatatttagtatttaataaaaaaccgtgcataagaacaaccgtaacggcgaatattagttttgcactatcgatggttttatttttcattagatggctcgcctatttttttataattatctcttttctcggcgaaaaaattaaaaacaagcaactataaaagaataaattattagttagttttgttttataactatgggataggtcatccccttagtttggggaaaagttttttattaggttaagtttttgacaagatattttatacccacaaattaagaaacctgcaagtatctgaaccctgttggtagtctaaacgagatctatatcaataaaaatgccccgctaccctcgctaaaaccagattataacttaaaaagtacttatcacatcactgcgcatccttaaattggtgggtcacatcattaccaatgatgtgaaatcccgcacggctactaaacgaacgtgttatcagcacgctgtgaaaaaggggagaaagaggttgcgggcttgtatgcctgacctttaggactgacgatgactgaaagacttgatcccctccctttgaagcccatcactcaagattggctattttatttttgggatttggtaaggaaaaagttagttagctaagagaataatgactgtgaaaattgttaattacagagcgaaaatcttctatccagctgaacattaagaggaaaatgatttttcactctcaaacagtttttcgtaatgtcatatggctgacataaaactgacacaaatattttatagattgttcacacaaattattgagctttatgctgcttgaaggtctataggatattcactgatgagcgattacctccccactcgcccctaccactcagtaccccttcgttgccggttttggtaaacaacggaaaacaaaaaaataaaaaagcgatcctcctgtttatgggtctcctcgtgcttggctgtgttttcaccggcagccgtttattcgccgatgttcaacataccggtctgaccgagtcccataatctgctgctgctgttgcctgccattgccctgttcgtcgcccttggctttgaatttattaatggttttcacgacaccgccaacgcggttgctacggttatctacaccggctctctgcccccacggtggccgttgtctggtcgagcgccttcaacttcctcggcgtactcgcctccagcggcgccgtcgcctttggcattatctctttgctgccggttgaactaacgctacaggcaggcagcagcaacagctttgccatgatttatgccctgttattctcggcaattatctggaacctcggcacctggtggcttgggctgcccgcctcctcctcccataccctgataggttcgatcatcggcgtaggcgtcgcgaatgccttgctgcacggtcgcagcgcagcgagcggcgtcaattgggcgcaggccctgaacattggctattcgctgatactgtcaccgattgtcggcttcgtctgtgccgctctgctgctgatgctgttgaagcgtctggtgaaaaagccgcagctttaccgtgctccagagcgaaaaggcgcgccaccgctgtggatccgcggcctgatggtgttgacctgtaccggcgtttcctttgcccacggctcgaatgatggccagaaaggcatggggctgattatgctgattctggtagcgactctgcctgtcacctactcgctgaatcgctcactgcctgcctcgacaacctcgcagctggtcacgctggccgagaccagcaaagcacagttgttacagcagttccctgaggaaaatgttcagcctccgcgtgaggtattagcgacttatttgcgtgacgggcaacgtacttcgaaggttatccccgcactggcacagattgaaggaatgatggccgctacgcttcatcaatacggttcgctgagcgatatccccgcagcgaaaatttcgagggtgcacaatgacctctacctggcggcggagactatcaagcggctagaggcggataaaacgctgatgctgtcggccgccacgcagcaaagcctgcatcaattgcaacagcatatcgatgccgccacacagttcattccttcatgggtcaagattgccgtcgcgcttgctttggggcttggcactttggtgggctggcgacgcatcgtgactacgcttggggagaaaattggtaaaagccacctgaattatgctcagggcgtaagcgcagaactggtcaccatgggcacgattggcgcagcagatgcttttggcctgcctgtctcgaccacgcacgtgctgtcgtctggcattgctggcgcgatggcagccaaccgctcgggtctgcaatctggcacgctgcgtaacatgattctggcatgggtgttaactctccccgccgccgcgctgatttcagccggcctttactggatttttatcactctgtaactcttgatgtggcaggaataacaagcgatgtctactcacacaatcaactataacgatatgttcgatgcgcgccttttgcaggaattttatgacagttatgaagagtcacttgagctggagctggaagaagccggtcttgaggagcccctcgatcaacaggaaaaagcctggcgcatacgctatttccgcgaactgctgcacttgcagggcgaactggtcaaactccagagctgggtaatgcgcaccggcaaacgtattgtgatcatttttgaaggccgagacgcggccggaaaaggcggcgttatcaagcgcattacgcaacgccttaatcctcgtggttgccgggtcgccgcactgcctgcgcccaacgagcgcgaacgcacgcagtggtatttccagcgctatgtttcgcatctgcccgcggccggcgaaatcgtgttgttcgaccgcagctggtacaaccgtgcgggcgtggaaaaggtgatgggcttttgcagcgacgaagagtatgaagagttctaccgaagcgtaccggaattcgaacgcatgctgacgcgcagtgggattcaaatcatcaaatactggttctccattaccgatgaagaacaggagctacgcttcctgagccgtatccatgacccgcttaaacagtggaaactcagtcctatggatctcgagagtcgccgtcgctgggaagactacaccgaggcgaaagaagtgatgctgcagcgcactaacattgaggaagcgccgtggtgggtggtgcagggcgtcgacaagaagaaggcgcgtctaaactgcatctcgcacctgttgcagcaggtaccttatgaagaaggagagagcagcaacattacgctgccgacccgcgttcataaagaggagtacacccgtcactcggtgcccgaaagtatgattgtgccagaccgctattaacctttccctctcccgtttctccctgtttagctgagcaggggagacttttgtacctctttcccgtcttgtaaataactctccccacgcttttcatgtgatgcagatcacatttatcaacattaaattatctaatcaaaatacggtaacaattattctattgaatgataatgattgctatttataataacattctcaataacaagtggcctccatgcgccataaacccatgcaaaatgtggttaatttagttttagacaactaaatctcgccctatcagggctttttggggctcttacattcccctcagcacatcaataactcttaacttacgatccgtcgtcaggcggataaagctgccatttttttatggcggcagggcctcttacgtctcaaagaaaggaacaggatatggtcttacgttcgcaaactcaggcagtgactcaaccgcaactgtcccccgcgctaccgatcctcaggacgctattttcaatgaaaagcagctgtcggcatgggcacagcagacgcaagacgtgttggcactcatgaccagcacggtgaataacgttgaaaaaccgttcagtggcatcctgcctcacgagcttgcccccaatttatcaacgttgatctcgaccagcctttgggcagcaacgaagcagcgctggaagaacttaaagacctttacctgcgcgatgcagtatggttccaccaccctaaatacgttgctcacctcaactgcccggtcgtgctaccttctctgctggcggagcagattatggccgcggtgaacagttcggtggacacctgggaccaaagtgcaggcggcacgcttatcgaacaaaaggtgatcgactggacgctctcacgtattggtctgccaccctcctcggacggtatttttaccagtgggggaacgcagtccaacctgatggccatgctgctagcacgcgacagctggtgcgcggcgcatcatcccggtcatctgattaagcatcgtggactgccacaggatgccagcaaatggcgcgtctttacctccagactcagccacttcagtattcaaaaatcgatggcgattctgggactgggctatgacgcagtgatcccggtcgactacgatgagctttaccgcatggacgtcgcgcagcttgagcaggaaatcttgcgttgtcatgaagaagggctgatcccgattgccattgttgccaccagcggcaccaccgatttcggcagcatcgatccgcttctggacatctcgacgctgtgtcagcgctacggtctgtggatgcacgttgatgcggcttacggctgcggtctgctggtgtctgaaaatcatcgccagcgtctggccggaatcgaaaaagcggactcggtcaccgtcgattaccataaatccttcttccaaaccgtcagctgcggcgcgttctttgtgcgtgataaacaccacctaagtcacgtgacacatcatgccgactacctcaacccgctgagcgcgcagcaggaaggcacgcctaatctggttaacaaaagtattcagaccacccgccgcttcgacgcactgaagatgtggatgaccctgcgtattatgggccccgtagcgctgggcgaagcctttgatagcatcattgcactgacgcaaactgcccaccgactgctgcgcgcaaacccgaccattgaggtactccacgccccggaactgactactcagattttccgttacgttccccgcccaagcatgaaccctgcacaactcgacgacgttaacgccaacattcgtaaggcgctattccgctcaggcaatgcagtcattgccggaaccaaggtcgatggccgtcagtacctgaaattcaccctgctgaatcccaccactacggcagctgacatcgaagacgtgattgctctgattgtgcattacggtcgcgaacaggtgcgtgaatctgcgctgaatgcggttaactcataaggacttgatgatgaacaacaacatccttgattttatcggcattggtctaggtcccttcaacctcagtctggcctgcctgagcgaaccggttgaaggcctaagcggcgtatttctcgaccagaatccaggcttcgactggcataccggcatgatgctggaaagcgcgcacctgcaaacgcctttcatggccgatttagtgacgcttgccgatccgaccagcccttatagcctgctgaactatatgaagcagaagggaaaaatttactccttttacatccgtgaagatttcttcctgatgcgcaaagagtacaaccagtactgccagtgggccgcatcaaaactcagcaatctgcgctggaatacccgcgttgactacgtcagctacgatgacagtctgcaatgctatcgcgtgcgcaccgtggatacggtaagcggcagactacaagagtggctaggacgccgtctggtactcggcaccggcccaagcgcctggacacccgcctgtagccgtccacatcgcgaacgtttcacccattccagcgaatatctggtcaacaaggaacagctgcaaaagaaacggtctatcaccgtgttgggcagtggtcagagtgcggcggagatctattacgatctcctgagcgatatcgaccgcttcggctatcagctgaactgggtcacccgcgcgccgcgcttctatccgctggaatacaccaagctgacgctggaaatgacctcgcctgaatgggtcgattacttccacgctctgccagcagcaaagcgcgacgaaataaacgcaacgcacaagaatctctacaaggggatcaacagcagcctaatcaatgacatctatgacctgatgtacgtaaagcagttggatggaaatttagacgtcaatctgtttacgcattctgaactgaccgatatgcgctggctgccggaaggcgaattcgagctgtcgctgcaccagcaggagcaggacagcgcctacactcgccgcaccgaaggtctggtcatggcgaccggctatcagtatcgtccgccgatgtttattgaaggcattgcgcaacgcctgcgttgggatgaaaaaggccgttacgacgtgcagcgtaattacagcattgaccataacaatcaggtgtttgtgcaaaatgccgagctgcatacgcacggttttgtgacaccggatctcggcatggcctgctaccgcaattcggtcttgctgcgcgaactgaccggccgtgaggtgtatcccgtcgagcgccagattgctttccaaaccttcccgtcaaaatcggaacgttaaatatgtctcaatccctactgttcaaaacttcccgtccggcgggcaactttacgcttcggccaatgcgcaccgaggatgccgcactgattcacagctgggtcacgcgcgattatgcgcgcttctgggggatgcaaaacgacagcctcgagaaagttgccgctttttatcagcgcctgacggcgaataaccccgggctgcattgatcggctgctgcgatgaccagccggtattcctgatggagttttaccgcgccagcgaagatgaggtcggtaagcattacgccgcaaaggcggatgattacggcatgcacatcctgatcgcgcccgccaataaaccggtgaagcagtttagctggcaggtattcaccgtagtgatggactacatgttcagccagccagaggtcaatcgcgtggtggttgaaccggacgtgcgtaacaacaaaattcacccgctgaacaagcgcgcgggtttccgctaccagcacaccatcgatatgggtcacaaaaccgcgtggctggccttctgccagcgtgaagattatcaacgagccttactgcaggaatcgctaactatgaacaacactacaccgctgcttaccggaactcacttgtcagctgataactgggcacaggccaaccgtatgctgatccgcaaagcgattgccgaattcgcccacgagaaaatcattaccccgagttcggtgggcaacgggcgctattcgcttgccgtgccgggtgccgaggccgaataccgctttaacgccagccttctggcattggatcactgggagatcgacgccgactcgttgatcaaacaggaaaatggtcactctttggccctggatgcgctgcaatttattgtcgaatttaatgcgcaaatcggcatcccccaggcgctgttggcaacctacatggaagagatcagcagcacgctgtgcagcagcgtctacaagctgcaaaagaataatccagacagtcaggcgttggtcacagcggacttccagaccgttgaggcctcaatgaccgaaggccacccctgcttcgtggccaacaatggccgtatcggctttgacgcccgtgactatctggcctttgcgccagaggccgcaacgccaatcaatctggtctgggtcgcggttcacctgcgcaacgcgcacttctccagcctgagcaatctggaatacgatcggctgatgcaagacgaactgggtcagccaaccgttgaacatttcaacgctcagctggtggagaaaggcctgtcaacagacgactacctctttatgccggttcacccatggcagtggcaaaacaaactgctgacggtgtttgcggcggatattgccaacaatgacatcgtctatctgggaaccggcgacgatcagtatcaggcgcagcagtctatccgcaccttctttaaccgcagccagcctaaaaaacgctacgtgaaaacagcactgtccgtactgaacatgggctttatgcgcggcctgtcgccttattacatggcgaccaccccggcaattaacgaatggctcgacggtctggtgaaaaaggatgcgtggctacagcgttgcgacttccgtattctgcgcgaggtggcggcagtgggttatcacaaccgctactacgaaagggccatcaagggcgattctgcctacaagaaaatgtttgctgcgctgtggcgcgataacccggtcgtcgatttgaagcctaaccagcgcctgatgaccatggcgtccttcctgcacatcgaccctcatcagaaagccctgctgcctgcgctgattgccgactcggggctgccggcggaacagtggattgaacgctacctgacctgctacctcagcccactgctgcactgcttctatcagcacgatctggtctttatgcctcacggcgaaaacctgatcctgctgctggagaataacgtgccggtcagcgcctatatgaaagacattggtgaagagattgcggtgatgaacccggaggcggtgctgccggagaaagtgcagcgtctggcggtggacgtaccggaaaatctgaagattctgtccatctttaccgatgtcttcgactgtattttccgctttattagcgccattttgcaccagtctgacacgctgcctgaagagaagttctggcaggcggtagcgaactgcgtgaaggaatatcagcacgcgcatccgcagttcgccagcaagtttgcccgttacgatctgttcgcgccggagttcacccgctcctgcctgaaccgtctgcagttggcgaataaccagcagatgattaacctgtccgatccggcggaaaacctgaagtttgccggaacgctggttaacccgattgcccgctggcgataaccggccccgctgtccggcataaaaatgggcaccttggcgcggtcgcttcggcgaccgcgtttttatcatttaataagggaaggatctctgatggccctttttgtacccgcgtcgcgcctgactcgcagacacctgattttcccgctgtcgctggtgctgttcgagtttgccacctatatcgcgcacgacatgattcagcccggcatgctgctggttacccacgagtttcacgttggaccagaatgggtttcagcgtcactgacggcctatctgattggcggtatcatgctgcaatggctgctcggtccgctttctgacaagctaggacgccgtccggtcatgctctcaggcgtcgcatttttcatgctgacctgcatggcgacacactgggtgcaaagcattgagcagttcgttgcgctgcgctttctacagggggtaagcctgtgctttatcggcgcggtgggttatgccgcgattcaggaagcctttgacgaatcgctcagcgtgaagattatgtcactgatggccaatgtggcgctgctggctccgcttgcagggccattggccggtgccgcctttctctctttcagcgactggcgcaccatgttctgggtctttggcggcatcacggccgtggcgctggttggtctgtggcggtcgatgcccgaaacctcgggtgaccgttcgacttcgctgtctatcccctcgctcgccaaaggttactacgcccttttaaaagaccgtcaggtgatgagcggctcgctggctattggtttggcgaccgttccctgtctcgcctgggtggccctgtcaccggttattctcattcacgacgaagggcttagcaggatggattatgcgcttttacagttgccggtattcatcgccatgatagccggtaacctgacgctgggccgtcttgcgacccgtctgcctatcgagcaaccgctgcggctcggtgcctggcctatcctcatcggcctgtttattgcggcaatcagcagcgccatcaacacccacagctacctgtggctcaccgccggactgagcgtttacggctttggtaccgggctgatcaacgccggactttaccgcctgacgctcttttccagccgtgtgggaaaaggccgcgtggcagcgatgctggggatggtcactatcgtggtatttgcgttgggaatagaggccgccaaagccgcgtactttagcggtggcagcctgcgcttcagcctgattaatcttctctgcggggtgctgtggttctgtctggtccgcgcctttttaagcgaaaataaacgccgtagcacgcttgccgttcaagagtaatctttcataaaactctccaaagcgcctgatacaggctatcgggcgcttcctggtcatcagccgtttaatagttaaaaaccattaattaaaaagataagtaaaatcaacagttgaaatgcttaatagaaaagctaataattctcattaagattactcttatctttatatcaccgcatcgcattcctttgtgccctatataggcgagcggcaacaattaatctaattttctaagggaattgataatgagaatgccttttagcttaaagcgttctgttctgctttgttctgtcgcactttctttaccaggtatgacgtacgccgcggatacaatggttgttaccgctcagcccgtcgatacggcgacctcgccaactatcggctatacggcaacaacctcaaaaggggccactaaaaccgaccgtcctctcgtgaccaccgcacagtcaatttccgtcgtgacgcgtcagcaaattgaagaccagggtgcgatggacgttaaccaggcgttgaactacaccgccggtgccttcaccaacttcgcgggtgcggcaacgcgttacgacaccgtcgccctgcgcggcttccacggcggcgacgtagacaatatcttcctcgacggcctgcgtctgatgaccgatgcgggcagctacaacgcactccaggtcgatccgtggttccttgagcgtatcgacgtcatcaaaggtccatcctccgcaccttacggccagtccgtgccgggcggattggtgatggaaacctccaagcgtccgcagtttacccaggaaggccatttccgcctctcttccggtaataacagcaccagcggcgccgcatttgattacaccaatgcgattaacgatcagtgggcgttccgcctgaccggtatgacccacgacagcaagactcagtacgaccacactcgcgaagagcgatacgctatctccccttccctgctgtggcagcctgatgaagacacttccctgttgttccgtgcctatctgcagaaagacccgtccggcggctaccacagctccgtgccgggcgaaggcagcgtaaccgaacacaacggtcgtacattgagcagtggtttttatgacggtgacagcgcgctggatcagttcaagcgcagagaacagatgtacagcgttgagttctctcaccgcttcaacgacacctgggcattccgctccaacgctaactattcacactctgacgtcgacctcgaccaggtttatcagattggttgggatacctcgaacccagacctgttgaaccgctattattccggctcacgttcttcactgaacgcctatgccatcgacaaccagctggaagcagactttgccacaggtgaagtcagccacaccgtcatactcggcgctgaatatcaccagtacagaaacagcctgagcgatgccagcggctccgccagccagctaaatgtcgtgaccggccaagccgtggggactaatccgtcttacaccttctataattcacgacgcagctacagccagaccggcgtttatctacaggatgagatgctgtggaaaaaatggcacctcgacctgtctggtcgctacgatcgcatcgtctcccagaccgacaactacgattacggcaccaaatatcgtcgtcaggacgatcacgtgagcacccgtgcgtcactgctctacgcgttcgatagcggtatttcgccctatatcagctacagccaagccatcacgccgcagtctctttccggtgaagacggcaacctgctgaagccaaccacctccgagcagtatgagactgggattaaataccagccggttggcacttctgacctctactccgtggcgctgtatgacctgacgcaaaatgatgtcggcaaccgcgtcatcgtcggctcgtactatgttccagctggcaaagtgcattctcagggcattgagctcgaagcgcacaatcagctgacctcacgcctgagcaccattgccagctatacgctgaaccacgttcgctacaaggattccgtagacggcaacgacggccacacgccttacgtcacgccaaactctatggcctcagcctgggcgaaatatcagtttgactacggcatgagcgggggtgcgggggtgcgttacataggcaaacagtgggcggacaacgagaacaccctgcgtgtagctccggtgaccctgctggacgcctctctgcgtgccgatctcggtgcctggaacaacagcctgaaaggcctctcgctacaggttaacgtcaataacctgaccaaccgtaaatacgttgctggctgctacggcaccggctactgctactggggtgctgagcgcagcgtcgtagcaacggtcggttacgacttctgatagcaagtgatagcaagccgataataaaggggcgtaatgccccttttttgcttaataaacggcggcaaaaattcgggtggggaaactcgccatcggcgctcggggaataatggcgtgcccgcgcatatccgccgaaacggcaatgtcaggacgtttgcaaaaccaggatgacgctttatagcgttaatttatgcagtatcccgactgaaattcaataatccagaatacctccccactctgcgtaaacattaataaccatcataaataaaaacaataaatctttattaatcgcaaactcatgcactaaacaaagaatcttaacgaagtttcggtggccgttatgcttaaattatacattcatgattaaaatttataattcaaaccaaagaatgatttctcatttaatttatttcgccatttatgagttcataaatccggtggaatgacgctaaatgaaaaccaaggagttactgtggtgcaaaaaagaaagcttggccagcagggtcttgaggtctcagcggtaggactgggggctgtccaaggcggccggtgagaccatcagacgggctcgcgcagtgactccgctcaccgccgtacaagcaggctgaaagaaaatcttggcgctgctgccgtaacattcacccctgaggaattgacgcaataaaataaccggtgaacgctatcccgatgcgcaattcgccctgattgatagaaagcgctaacctttacatcgctattaatgaaatttacacataagtctattcaatactgatgcattaatattattaaattcgacaggtaatattagggctcaggtttattacgaagggacgtatcatggaaaacacaacggcgactaccgcgccaaccctacccgcgctggcgatgtatagcgaaaataccttggcgaaaaatctttggactcgaagcgagctttcaccgcgcgacagaagcattgtcaccctggccgtggtggtgtcccgtcatcatggtgcggaacacgcgcaccaaatcagtctggctttggacaacggtgtcaaaccggcagagattgcggaaatcatcacgcatctggctttctattccggatggggtaatgcgaccgccgctgacctggccgcagagcaagtctttaggcaaagaggcattgatatcagcagtttaccgggccgcgacataaccctctgccgcttaatcagcaagctgaagaccagcgcgcacagcacgtaagcagcaacttcgccgccgtttcaccgggcgtggtgcagtttactaccgatgccgtgttcaacgatctctggctgcgtcctgacctagcgccgcgcgatcgcagtctggttaccgtcagtgcactggtcgccaacggccaggtcgcgcaaatcactttccaccttaacaaggcgatggacaacgggctcacccagtcacaggcaggcgaagcgctgacgcaacttgccttctacgccggttggccgaacgtattctctgcattaccggtgtttaagcaggtttttgagtcgcgaaacgtctaagcctataattaagctagaagaccacagtatggcacccattgaggaaatacatgaaatcacgcgataacctgaacgactatgttgcttttgtcacggtcgctcgggaaaagagcttcacgcgcgccgccgcacagctcggcgtttctcaatcggctctgagtcatactatccgtggtctcgaaaccagcttgggtgtcaggttgctgaccagaacaacccgcagcgtatcgccgaccgaggtcggtcagcggttgctggataatctggccccacgctttgaagaaatcagcagtgaaattgcctctatcggcgatgcgttggacaagcctgccggaaccatcaggatttcggccaccgactactctatccagaccgtgctatggccgaagttgtccagagtgctgaaggactaccctgaaatcaacgttgagatgatcaatgattatggtctgactgatatcgtggctaaccgttacgacgcgggggtacggctcggtgagcaggtgaccaacggaatgatctcggtgcgcatcggccccgatatccgttttgtggccgtcgcgtcacccgactatctgcgcgataacggcattcccgaaacaccctatcagctggcaaaacaccgctgtattaatctccggctaccgagccacggtggattctacgtgtgggaattcaagcgggacggtaaagaggtgagagcccgcgtcgatgggcaagtcatcttcaataccgtcatgcaggtggtggaagccgccgttgacggttacggcatcgcacaggttcctgaggatttggtcgaagactcgattaaacagggaaagctggcgcttatcatggaagactggacgccttactgtgagggattacatatattttattcgagccgacgccaggcttcaaaggcgatgagaatcgtgattgatgctctgcgctatcaacgcgactagaaattaaataaaagaattctgatgaggaatttattatgccggtatttcctcggtaaattcccctcgcattcatgagcagaatgaataattccattcattaatacctcctaatatttattaggatcaacggctatattcacctttaattatcaaactcaataagcaatccgtggatcattaatcctttgcggttgctgacacgatggtaaggaataaatgatgaaattagattttaataatcaggttgccctggtgacaggcgcagcatcaggaatgggtttggctgcggcaacggcatttgccgcagcgggagcccgtgttgccctcgccgatattaacggtcaggccgccgtcgacgctgccgaaaaactcaatgccgacggatataatgccatcggcattcagtgcaacgtggctgacctcgaagaagtgaaagccatggtcgagcacacggtggcaacctttggccgcctcgattttgcttttaacaatgccggggtgcagagcccggtggccgagaccgcagatgccagtcccaaagattacgacttcgtcatggacgtcaacctgcggggtatctggaactgcatgaagtatgagcttattcagatgcgtaaacagggcagcggcgcaatcgtcaacaactcctcactgggcggcctggtagggattgctgagcgcggtatttaccacgcctctaaacacggcgttgtcggcctgaccaaaagtgtcggtctcgaatatgcgcataaaggcatccgaattaatgcggtttgcccgggcattattgagacgccgatggtgtcaggcatgctcgaaacccagcctgaagccatggcagagctgatgaaagaggtaccaatgcgccgccttggccgtgccgaagaaattgccgatgctgtactgtggctttgcagccctgcatcgagctttattattggccacgcgctgccggtcgatggcggatataccgttcgttaattatcgccatattttcggcacagaggaataggtctgcgcgccgattggcattccctgccaactcccgccttgtggaacgctgacggcgattacgtcattgccttcgcgctacccgacgctaaagcgttaaaagagagaaaacgatgcagtttgagtcggtacaacaccatgaacatcaaggatccctgcgaattttgctgacgctgatgaccgtcgtgtttgccggtttcctgattatcggcattgcgctgcccgtgcttccccgttatgtgcacagcacgctcgggttcggcaacttcaccgtgggtctggtcaccggcttccagtttgcggcatcgctggcctcacgctttgtcgcagggcgctatgccgatgcacaaggcgggaaaaaagctatcctgcgtggcctgttcatggccgtggtgggaggcggattttatctgctttcactgtggtttcagcatctgccgctgatgtcgataacactcatcctgactgggcgagccattatcggcggcgctgaaagttttatcatcaccggcggcatgacgctcgggttggcgttagcgggggaaaaacaggctggccgcgtgattgcctgggtaggcacggcaatgtttgccgcctttgcgcttggcgcaccgctaggcacctttgtttactcacgcgcgggctttttatcgattgcggtagcaacgataactctgcccttcgcggcgatagccacggtcagcgtgctgaaagaccacgtcgacccgttcgcaagtcaagggcgcatcggcgagacgctgaagtcggtatggttgcccggtctcggcgcggcgctcaacggcgtcggctacgccgcgctgctgtcattctcggtgctgctgtatgcgcagaaaggctggggaatgggatggctgccggtcagtgcgtttgccgttgcactcatcgtcgctcgcctgaccggcggcacccttatcgacaggctgggcagttttcgcgttggggtggggttttcagcgattacggccgttggccagggtctgatgtggatggccccctcaccgtggcttgcagcatggggtgccgccctcaccggcgctggttgggcgatggtttatccggcctttggagcagaggcggtgcgccgtatcggcatgagcaataagggcatggcaatggctacctactctgcatttcccgactttgcgattggcctggccagcccattgttagggctggcggcgcccgctggcgcaattggcagcgtttatctgtggagtatgaccgtcgccctcttcgcgatacccgttgcggcggtctcccggcgtcgttagccaaggggttaacctaaaaactcaaggatgctgaggggtgcgggttatcggttttgcctctgccacgatatcctcaacctcaatggcggggtatcgaatattttacggcacacgtggctgttgccccagcactgctcatacggatagccgatcagctcttccataaccgcgcgcacgtcagaggggatatgccctatcttgcctcccgccttgatgcgcgccacttcacctagcacgatcagatgcgtttttcggtttaacttcatttgcatgctaaagaccatcgccatcagcgccaatgctattacaccgacgcagaacaccacggcgattgctgtcacggcgctttccggctgggtatgtgccttggactgaaatccgtagaagctcagaatcgcgcccatcgcgaacacaatcatcgaacgcatcagcttgccggcgaaagtcatcgcccccgcgtagactccctcacggcgtcgcccggtaaaggcttcatcgatatcgggcaggaaggtatagaccgtccagggaatatagtacacaccgccggtgccgataccgaataccacggtgatgcttaacattgccgccgtcgcatactgctggggcagaggcaggaaatgcagcagactgtaacaaaccacggagaacaccacgatccccagcgccaaaatgtacggcttactgaatcccttcttaacgcagatactgataaaaatggccgttgaaaacagctgtaacagagagtttaggctactcagtccagcgaccatcgttgggtcatagcgcaatacgaaaatgataaagtaggtaaacaacgaagcaaacagccattctgcgccgaaaccgcacaggtacatgcccagatgcttgcgaaaaacgcgcagatgaaaaatagatttcatatccctgaccagcgcgatcagggtttttcccaaggtcattttcttcacctcggtggggttgtttcttccgccggacgctcccaggaagagaggtaaagcgcaccgatagcaatacacaggatgacgccgtaggtcagtgcggtgaaaaagaacggtgcagcggattctttaccgtagatcaaaatgaattggccggggatcagcgccgccaggaagttggcgattttaccaaaaatggccttatagccggtcagcctggaccgcgcagaaaagtcggtggtcatttcggtcgcgagtgtctcatacggcaccatcacagaggtataaatcagctcgaacatcacataggtagacaagtagtaccagaaaccgaagccctcaacccacagtagcggataaaacatcatgaggggaacgccgagcaggatgaagaaacggcggcgaccgaagcgcttaccaaggcgcgttttcccaaaattatccgaaagatagcccattaaaggattgctgagtgcatcaataatactggcaattgaaaagatggccgaagcctctaacaaggtcaggccgcagaaggtggtatagaaataaagtagccagacacccgcaattgccaatgccccgctgcccaagaggttcccaccgccgtacgctaactgatgcctgaataaaatcggtttttctgcattcatgagatatccgccacgagagagattgtaaaaatgaaccgacgtttcatttttttgaatgctgagttttatatcttcagagcagaggaataaatgtgagttagctcaaacttaacgcgacgggtggccagcgttcacaccgttttgagatatgtgtagcattcttaaccattaaatctgcgtgcctgaataaatcctctatgcctgaacagagtcactttatgaattttgaggtcatccccttttaaaacagtaaattaatcaaaattccgagtaaaaaattgccctcgagaagctcgccagagtgactcagaacgtcagtagccgttaacccttcgtcctgtagaaagctcttaaggtcgggttttgtgagcggatcgacatttttaacagaatccgctgcggtttcgcctataacgatgggaatttgtttttattttaatgaaatggtgtttcaattaatggattgaagccgatgtacggctagatagcctgttgtccgggaggaagtcatggcaaaaggtacgcagattcagttcaatttccaaacctatcaggatgaagtgactggggcgcatgtaacacgtttaacgccacccgatgtgctgtgtcaccgtaattatttttaccaaaaatgtttcacccgtgacggcagaaagctgcttttcgccggagagttcgaggggaacagaaactattacctgctcgatttggaaacacagcaggcgatacagttgaccgagggcaaaggcgacaacacctttggtggattcctttctcccgatgataaatacctttattacgttaaaaacgaacgcacccttcagcgcgtatcgctagactctctcactgaaaaattcatttatcaggtgtctgagaattgggtcggttacggcacctgggttgccaacagcgaatgtacccgtttggtcggtatcgagattcgtcgcgaggactggactccgctctctgactggaaaatatttcagtcgttttatcacagcgctccacgctgccgcctgctttgcattgatttactcagtggcgaatcccgtgttattcacgaaaaaaatcagtggctcggtcatcctatctatcgcccttcgacgataatacagtcgcattttgtcacgaagggccgcatgacctggttgatgcacgcatgtggctggtcaatgaagacggcagccatgttcgtaaggtgaaggagcatgccgcaggcgaaagctgcactcatgaattttgggtaccggacggttctgcgctcatctatgtgtcctacctgaaaggtcaacacgatcgccatgtccgtcgttttgatccgcaaacgggtgaagacagtaacctgatgaccatgcctgcctgttcccacttaatgagcaatcaccacggcacgctgttggtgggagacggttctggcacgccggtagacgtaaaagacaccgccagccataccatcgaaaacgatccctggttgtacattttcgatgcgcagacccgcaaatacgcgcctttggcggcgcataacagctcatggcgcgtgctggacggagaccgccaggtaacacatccgcacccttcgttctctcctgatgacagccacgtgctgtacaccagcgatgtggaaggccttccggcgctctatctggcggaaatacccgcaaacctgctcagctcattacgtaaggactaacccgtgtttattttcaaacaagatgttcccctgcaggatttaggcgaaggcgttagtcgccgtgtgctggcgcacggcggttcgatgatggcggttgaagtgtcttttgaacaaggcgcagtcggcccgatgcataatcacgttcatgaacagctgacctacgtgctgtcgggacgtttcaggttcactatcggtgatgaaacacacgacgtgaaagcgggtgatacactgtataagaagccgtatatcatgcatggctgtgtctgcctggaaaaaggcgttctgctggacacattcacaccgcaaaggcaggattttctttagttcattcccctgccccgcggcgaaacgctggacctagacatgacgcgactcatgtccgttgatagagtgtctgtcgatagagaatacagagtctatcctttattctttactgtagcgctcgcggtccaaagggccttttaatctcgtcgtacgatctggctttcaccggctcgaggcgagagacatcaacatttttagccgcttcatgcagattgaaatagatctgcatttttaaccaggtctcggcagagcttcctaatactcgggaaagtctgagggcaagttctggcgaaacgtctctttttctagagagcaaacgtgagacagcggaaggcgaaacttccattgctgtcgcaagctgacgaacgccgatattgagttcggccatggctgcagcaattatttcgcctggatgtgggggttcaaaggggtacatacgtatcctccattaattcttatttctctggtgcaattgatgaactatttacgaaacgccgccactttctgctttccgttgattaatacttttctacagatcgtttgtctttttaaataaaagtggcaaaatataaattccgaattagttcattgcataataaatacaaataacacacaaaaaacctacaatttaacttatctttaattatgaaagcccgttatttaatggattcttaacgttatactcaaccataattaaaaaaatcgactccttccaacctcttattattttagaacattcccgcagatgccctccatttcataatccggatattcaagcaatttaatcgccaatttaagggaggcccgataagaatgtggccatcggtggctgtgacgcaatttcgctcgaaatctactcagcatttccagtttattctgtacaaccccttcaacggctaaagccagtgccatttctccaatcatctggcaagcccccggtacgcggggtcatcgtcaatctcactcatgacatcctccgaaatgatcctgtgaaaatttgcataagaaaaatcctaaatgtaataaaaatctgccggaaaaatattatttcacgcatccaaagttacgttggacgtcacacataaaaataggagcagattattttcaatataaacttttttcttagccagtcaaacgacattctccaaactcagagcactcatcggagggttacggctatatatataatatggatatcaacaatacagacacataaaaactcgctcaaatgattgaatgaaaaggcaaacagaacttaaacaaagtcgatacaggacgctaaaaatcgcatccaacctaattatcagacctgagtaaatcatcaaaaatctaattctttatcgaagagaatttctttatcttggtgggaaaacatagaattcgagggtattagttgcacaaagccatactgtctttaacttattgaatgactgtttcgatgattgtttgttcataaagttatacagcggcaacaccgctgtatagatataaggataaatataagcacaaatataattagcctgatagttatagaaaatcctttttatcattaaccgtcagtggaacgcgtcaggtgctcccaggcatcgatttccgcgctcaatactgccagcttattacgtaccaggcccagcgcgtcgctgcccaacaataaatgagtcggcggcgaatcactctcaatgaccgccagcatggcctgcgcggctttaacaggatccccgagctgcttgccatttttcgcttcccgcgcctggcgaagaggattaaataagggtcatagtcggcgatggctctcggacttctcaccattgagcgccccgcccaatcggtgcgaaacgaacccggcgcgacggccgttaccgcaatgccaaaaggttgcaactcttgactcagggtctctgaaatcccttcgagcgcaaacttgctgccacaataataggcaataccggggagggtaatgaatccgcccatcgaggtgatattgagaatatgcccaccacgccgctggcgcataaggggaagcagcgcttttatcatcgccactgcgccgaagacattaacgtcaaactgacgtttcatctcgtcgagcgacgactcctccatcactccctcatgcccatagcccgcattgttaaccaatacgtctatcggaccgactgcggcttcaacctcggcaatcacgccatcaattgccgtaaagtcagtgacatccagcagccgggcaaaggcacttgcaggagcaagcgcttcaaaagatgcttttgcctctgcgctgcgtacggttcccacaacccggtgaccgtgattgattgcctcctgtgctaacgcccgtccgaagccgctgctcacgccggtaataaaaataattttggatgaagacataaatactcccgttcatgatgagatgactgcataatattctcttgaatgggatatttttagaccagatactctctatttattgcctaaaactatgaggcaggcgcaatggataacattaatacccccaagggcgcagaccaacagaagatggtctgccggcttctggccctggcgcccaacgaaggctacaacctttgcgcccttcccggcgtgcgtttcctgcgctcgaaccggccgctggcacagacgccggtcctttacgatccgggcatcgttattgtgtgtcaggggtcgaaaaggggctatttcggtgacaaaacctacctttacgacgcgcagcattatctcgccgtctcggtgccagtcccttttgtgatggaaaccgatgcatcaccagaatgcccctgctggcgatatatttgcatctcgactttcagctcgccgcagaactgttaattcatatagaaacctttggcgcgccacagccaacgacggctcccgaaagtatgatgtccagcccaatggatgcggccctaagaaaatcagtacttcatttcctcgaagcaatgagcactcccatcgatgcggccattctcggaccgaatctggtgagagaactttattaccgcattctgtgcggcgctcagggaaaggccatgcgttctgcgctggcaatgcaggggcagtttggaaagattggcaaggcgttaagacatattcatgctacctatgcgtcgcatcttgacctcaatcagcttgctctggaagctgggatgagcgtgccgacctttcacagccatttcaaagcgataacccgcacctcaccgatgcaatacgttaaatgtactcgcctgcatcaggcccgattaatgatggtcaggcaaggcgtcaccgcggccgtcgccagccagtcggtaggctatgaaagcgcctcgcagttcaacagagagttcaaacgcttatttgggttaccgccagcggaagagacaaaacgcatgcgtgaaaattttgccgttcctcctgcacattccgcctctgagtttgtctcgtctcattagtcaccgagagaagcgctattgatgcctatcttttaacggcacccttctgatatctcaactagtctttaattttatgtcagaggacaggagccgttaagcatgtatttatccacgcataatcaaaaagaagataaagagaatcaggagccagaatcactgggttcagcttctctcattcagcaaaagttgctggactcacgctcaatcattatttcaggtgaaattaatcagacgctcaccgaaaaagtggtgtcgcagctgttgttacttgagggaatcagtgatgcgccgataaaaatatacctcaatagccaaggcggccacgtcgaagcggccgataccattcatgacatcataaaattcattaagcctgaggtgcatattattggcaccggctgggtcgcgagcgccgggataaccatttttctggccgccagcaaaagtcatcgctatgcgttgcctaatacacgttttatgatccaccagccgctgggcggcgtgcgtggacaggcaaccgacattgaaatcgaagctaaagagatcctcaagatgctggatcgcgtcaataacctgattgccgatgccaccgggcaaccggtagagaaagttaaaagggataccgaccgtaactactggatgagcccgcaggaggctatcgactacggcatcgttggcagagtcgtcaccagctataaagatttaaacctgaaataacgggttcgcggcgcaataaccacaaagcggcggctcaattcgctttgtggttaaaccctttgctcctttttaactgacggttttaaggcaactcagaaatttgttacgggtttatccattcagtggctaagaaaagtcattattaatattttgtaaagagtcccggtggggatataccaatattgggtaatgttgcctggtactgatatttgataaacgatgacgattgtttttagacagttgcatgctggcgaccgagaagaatatctcaccttgatgctggcagcctataagcctatttatgcgttaggcattcccttcgatgcggctaccgctacgctggaaaaagtcacacagcatctcggccgccgtcagagaaaatcatctcgactcactgaacgtgttggagaaatccggtttacgccgttcaggcaaagtcaccgacgtaaaagacgctccggcgagcctggtatttacgataacctcagaccaatggtttgagcgtccggtctaggcatttatcggcgtcgttttttgcattactcgcgtcaggctgatgagtgccgcacccacggcaagcgtgcctgccagcatcagcgaagcatcggtgccgtgattctgaaacagattaaacatcagggccaccagcgccgccccggtagtttgccccagtacgcgcgcggtgcccaaaagtccgcttgcgccaccgctgcggttgctgggtgcagaagctacaatggtatggttattgggagactggaacagcccaaaccctgcgccacacaaaatcatccgccagataatgttcagatgcgaaggcgcattgggtaacagcgccagcgaaaataaccctaatgaaaaaacgatcagccccacgcctcccagcaccccggcatgataacgcccgaccagacgccctgataagggcgctatcagcatcgttgacaatggccagaaggtcagtaaaaacccggtggaacgggtgtcaaggccaagtgaattctggaaaaagaatggcaaggaaacaaatgcgagggtataggccgcaaaagagcacatggaagtacaaagcgataaggtaaagatgggaatacgcagcagatctactggcaacagcggcagaggacgcagccgttcacggcgaataaagaaccagccaatgataattaacgcgacgacttcaacaataataatccgatggttcatcccttgggcatatccgctgatagcgctaataaagagcccaaaggtcaacgcgttcatcaggctactaataaaatcaaaccgtctgccagaatgcttgagcggattttctggcaagaatttaaaccccataaacagtgcaatcaggccaatcggcaggttaatcgcgtaaagccacggccatgaggcgacagagagaataagtcccgctacggtcgggcccgctgaggccgaaaccgcgacaatcaccgcacccgtggcaatgcctcgccctaagagacgcttaggataaacaatgcgaatcattgccatattcacactgagaatagccgccgcgccaaacccctgtaatatgcgggcaagcgtcagcgtgataagagaatctgacagggcgcaggcgagcgaggtaaaactaaagacaaatagcccgagctgataaatacgcttatagccaaatatttcccccagcgaagccagagaaagcagcgagatggttatcgctaactgatatgcattgactatccagatagaggccgccgcactggcgtgaaagtcacgggcaatggtggggagtgcgacgtttgccaacgtgctgtccaatactggtacggtgatgccgagcgccagagtcaaaatggcaccatagcgctgcggcaacggcagtccatcattaatcatttttgtcatgagggttatatcaaattattgcttatacaatttcaaatatcagctataaaccaataagtgaggaattaaaatcgagcaatagttataacaaccacaatacaaattaacaataatttaacgtctgcaccgaatgataattatcatttagcgtgcggactttattaattaaagctgtcaaacaaaagggttagctaattactgaaatagctttgccatttatttaatttagcaccctcgcgaaactttacgttattaccgagggccgtgccgtattatatcaccgcgatttgccgactgcgcaaagcctcgctaatttcagtgtccaactctccgtcaacgatgagcgtgctggccagagataaatcgccaatcttgaacgccgaggctgaattcagtttctcggccgacaccatcaccaccgtttcggcagctctgtccgacagggcctttttaacgcaggcttcctcatagtcgccggtggtgaatcccgcgcttttatgcacgccggtaacccccataaagaaaatatccgcattaatacggctaatggcatccatcatcgaggcaccgactgtcaccatggagtgtttaaagagccggcctccgatgaggatgacgtcaatcagcggataatctatcagacctaccgcaatactggggctatgggtcacgacggtgaagggcagatccctgggcaaaaaggtcagcatctcgccggttgtcgtgcccccgtcaatgataaccacctgcccccgctgaatcaggctcgccgctttctgcgcgatgagccgttttgagctgatgcgtacgctttttctttcttcaaaaggcgcgattgcttctgaaacgggtaacgcgccaccgtgtaccctttgcaataatccttcagcggccgggcttttggacgacagctcgcctgaggctcgcgttatcgcagaagccgaagaagaaactggctttcagataacccaggtcgaaaaggtattcgaagcctatatgagccccgggtcggtgaccgaaaaattgttcttctttattgctgagtactctgaccacgaccttcgcggcgacggcggaggcctgatcgatgaaggcgaggatattgaagtgctggagtggccgttcgagaaggcgatgcacgccattaagacaaatgaaattattgatgccaaaacaattatgctgcttcagcatctggcgttgaatgccattattgactgatttatggcacttccagcttgtccagcagcgccctcacgctttctgttgcctgcgcgtgacgcgtctctgccggaatgtcgtcccacggcatagcatcgtcagcgcagtaatcgccaatacagagcgggctaatggcgtcgtccagtaaacccagcggcagccagatatagggaaggtttcgcagaagattaggcacgctggaaccgcactgtttgcagaaatcgtttctgtatcctgtcggtttaatccagcttgctattgcctcctcccccgactgccaactgaaatcagcggctctgacaagggttgccaggttatgtcctacaccactctgtttacggcacagcgagcagtggcagcggtaaaagaattttgggcttaccgcgagggagaacgttacctcaccgcacaaacagcttcctgaaagcatacttcttatcctcgattcgtttaattagaagaatatgtcatatttttcaggctgtttggaaaataaaaaaggccgcacccggcagcctttttgcgacaaaaatgagtttagtgagttcgttcagacttgccgagcgcgtaggccgccgggagatcgagacgttgccagaaagcctgctctggcgtgtttccagaaagcggatagcctgccggcaaggccgttttgaccatcaactgacggcgtttctcagccgagaggtggggtaaggcagactgtagcaggacttcggcaccggccggcacgctcagggctgtgacgcaccctgctgcttcgccagaccatagctcatggtaaagcgataaaactgcttcatgtctggcgagcggtacgggtcatcatgcccgacggttttcgcacattcggccaacgtagtaccacactctttctcaagcgcagcacgcagttgatccttcgcttcattaaacagcgtcacgtagcgcggatcgttaagatagtgcgcgacattacgctgcgtcaccatacgcgaacccatgatatcaagcggataatgcacgcccaaaacgatgcgcgaatagccgtagcgcgcgccccgctccaccagcgagtcgtaacgctcagggatcatctgcgccattagcaacgcatcggtgtagccggtattggtgtgtccactcgggaatgacccccgtcggcggtgtaaggttggttgtctttcaccaccgtatcatccggcaccagatgtatagtgttgcctttaatcagaaacgggcgcgaatagttaaagtgctttttagccgcactggtgctgacttcgctcgccttaatcaacgctgcggccttgccaatttcacccttatcgtaggcggtcaggaaagccttgccgagacgtggccccattgcatcggcgaggaaatagaggtagctaatgccttcggcgtcagccagcgcctggtgacggacgccctgagttgcatcgcggttaatcgcggtgacggtctgaaggctagcctgtagggtggagtctggcagcttactgaatccggataacagctcaatccccgcctgctgattggccttagtctggaaatcatagccgctggccttcagccacgccttgtcagactgggtgtcattctgcgaggctttatccaactgaccccgggtcagcgtcgctgcccccccttcagcgcattgatttctgcctgtaaggactgcgcctccagtgcgtcaaaagcctgactggcggaagccggagaagtcccgtttgccagtgcggcggcctgcggaagtgagactgcctgcgcctgctgcgccaacagcagcgtggccgcgataagcgttaaccgaattttcattaactttcccttataatcaaactattaccctgttaatgcacaacgctagcaccgcaggatgacagttttattgcagaaaaaatttttagccactatgggcgtgtcttcccgcctctgccccttgccccgggtatttatatcgattaggttggttaatcatcaagcgcgacagaagtgagaaactatgaattaccttaaatggtttagtctcggttatatcgttgtcctgcttttatcatttggatatagctatgccagagcgtcgcagacctcggaagctcccgtgacgcaaagctggtcaacggcgcgccgcgattcgtccaatcttgcgcccgatccgctcaagtttgccgatacggcgattgttgaggtttatgccgctaaaacctacggctggcgcgggctgttcgcagtgcatacctggataatattcaaaagagccggagagacccagttcacccgctatgacgtgattggctggcgtagcgacgacgttgtacgccgcaactacgccattccagacggctactggtttggtgccaaaccccatattctggtcgatcatcgtggaccgcaggccgaggcaatgatcccgcagattgaggcggctatcaaaagttatccgtatccacagacctatcacgcttggccgggtccaaacagcaacacctttattgcccatattggccgtgacgttccggctttacagctggatatgccctcgaacgccatcggtaaggactatcgtccgctgacgcatccggtgggattgccgccttcggggaaaggcgttcagatttcactgttgggacttttgggactcaacataggtgcgcaggaagggatcgaaattaacgttctggggctgaacctgggcgtcaatatcgcgcctcccgcgctacgtttaccctttatcggcagcgtaggtgacgggaatacaacgacggtgcccaataagggctgagagattctcagaaccgatgttgcttaaaagtcaccgccaagattcagaatcgcaatctcgattttgaggtctataattctacttcgggccaattcatggccctttactcgggcgcacgactgcccctgtccgacagcaccacatcattgtatttaccatcctcaacaatctgatgaataaggggtcctcatgagttcattcaaggcgcaagacggtaccaatatctattacaaagactggggcgcaggaaaacctattttattcagccacggttggccgctggacgcagacatgtgggacagtcagctcaattttctggccgagcacggctatcgcaccatcgcgttcgaccgccgcggcttcggacgctctgaccagccctggaacggcaatgattatgatactttcgcctcggatattcgcgggttaattgagcatcttgacctcgaagacgtcacgctggtcgggttctcgatgggggcggtgacgtgtcgcgctatatcggcaattacggtactgaccgcatcagcgcgctggtgttactcggtgccgtcacgccaatattcggcaagacggatgactatcctggcggcgttgaaaaatcagtatttgagggtatcagagacggagtacgtaaggatcgcgcgcagtttatcagcgatttttcaacgccattctatggcatcaatgagggaatgagcgtatcggaaggtgcgttgacccagaccttgaacatcgcgcttttagcctcgctgaaaagcaccatcgactgtgtgactgcatttcaggtgacggatttccggggcgatctggccaaggttgatgtaccgacactcattattcacggcaccaaagaccaaatcgttcccttcgagttaaccggcaagctctcggcagagattatcagtcactcgcagctgaaaacctacgaaggcgcaccgcacggcttcgccctcacgcatcaggacaaactgaacgaagacctgctggccttcctcaaaacggtttattaatacggcatttacccgcccctttatgacctgtaaaggggcgcgcgctcttacagccttttacccggcatcatccgcagcaaggtattatctttaagataatagtgatggaataacgcagccgcggcgtgcaatccaatcagataatagcctgtgttggcaataagctcatgaatagactttatctttttggataacagtaaattcgggtcgtaagttaccggcatcttcacgccaaaaagagcccactcggtgcctttaaaatacatcgaaagtattcccatgatcggcaccacaataaagaagatataaatgatgccgtgcatgatatgcgcggcaatgtcctgccagtgtggcggtttaggggtaattcccggcgtaacatacatgagccttacgaacacacgcgtgctcatcattaataatacgctggcaccaaagctgtaatgcaggacggttaatagcgcatgctgaggtaaactttttggaataaagcctttgagctcaatggtggcataggtggcaacaacaagcaggaaaataagccaatgaatggcaatctgtataggactgtatttaacgcgcatgtaagtgtctcaagaaagatgctgaagtcagcgtatcttcaagagattaagcgcacattaaggcaagaaagaaaccgcaatccgtgagccagattgcggagggtgattaagattttttggtctgaacccagaagccgtgaataagtcccgggaaatatccgcaaatagtcagaatgatattaataataaacgcccatccaaatcctttgccgattaaaacacccagcggaggtaaaatgatggtaaacagaattctccaaaatcccatggtgctctccttttcgtttttgatacctaaccctatcgaaatagaaacatgtacacaataagagttctcttggttaccgattgcgtcgcgaaaccagggagattagtatttgattatgcaatgatgaggctggcagtggccaactctggggagacaggtaatgaagcaggacgtgataatgctgatcctcgcgataatttttatcgtgataatgtttggcacgacgatgagcatcacggtacgtgccaaagggttgaaaaaggcctattggcttctttgcagcttcctgattggcatcggcagtttgtctttcatctattttctcgcttttcccgaacatcctggattctcggcaaatcgcccagcgggtgaaattcctcccgaactgatgttcgccgccacgctaacccgcaccggtatcgccgccgccctgctggggtttctggtgcacggcatttggcggctgatcggttttttcggcaaacgtgatgcctcctgacatcgggtttcgcttgataacaatttgtttcggaagaacagcttggctcaccgtacttttcgctgtatatttatacagccaaattaccctggcatttatgccgatcgcctcccgctatttattttaagaccccctttaataaatagaacggcgataaatcgaatgacaaaaaattgatagagagtgagccatgcgggttgaactgagttatgacaaaaggaatgtagcggcaataccagatgccggtgaaaaaattacccgggagctcaccaagcgggttcacagaatgtttcccgacgcggaaattaaggtcaaagcgatgcaggccaatggtctcagcacgcacggcgtcagtaaacaagaaaagtcacagttgaatcagatgcttgaagagatgtttgaggaagcggatgaatggctttcttatgaataagccgttattatttacttacaaagcgcaattgaaataaacatatcactgcgatggcttattataagatagccaaagaagataaaatattttaacgaatttgcgaagtaatcgatgccaaatcctaagaaaaacagcgctcaaccccatttttattctaaacgtttcgcgttgatttgcttaggaatcgtctgctgtatggggctattgctggcccgcgtaggttatctccagctgcttaatcggccgatgctggagcgtcaggccgaccaacgctcactgcgcacgcaaattattcccgccgatcgcggcaccatcgccgatcgcaacgggcaccctcttgcgctcagcgtggcgtctaaagacatcatcgctgacccgtaccgtatcgaacagctgcacagcgatctgaacagtccaaagtggcaatatctggcctcggcgctcgatatgccgctgtcgcagcttcagcaaatgatcaccagtgaccctaagcgtcgcttcgtcttcctgggtagaaaaattgaacagggcatcgcgaaggacatcggcgaactgcacctcggcggcgttatcctgcaacacgacgacagccgctattatcccatgagtgaggcggcctcgaacctggtcggcgtagtcggtaccgataacgagggtctgaccggactggaacgtggtttcaacagtctgctgcaaggcaagcctggtatgcgtgagttccgtcaggacggtcagggtaacgtcatcggtattcttaaggacgtgccgccgcagcaaccaccgacggttaacctgagtatcgacagctatattcagtacgtggtgtatgccgcgctgagaaaaggcgtgatgctgaaccaggcggactcggggcagcggtgatggtcgacgtcaacaccggcgaaattctgggaatggcctcttacccttcgtttaacccgaacaactatgctggcaccgacgtcaaagacatgcgtaacgtggcaattagcgacagcttcgagccaggttcgacggtaaaacctttagtggtgatggcgggtctcgcgcacaacatcattagacccgatacagtgctcgatacccgtccttatacggttaacggccaccttattcgcgacgtaggccacgagtcggcgcttactatcaccggcgtactgcaaaaatccagtgatatcggcgtatcgcacattgcgttggcgatgcctgcacagattctggtcgatcaatatcacgcctttggactgggcaaacccaccgatctcggtgtgggtggtgaaagtgccggttacttcccgctgcaccgcgaacgctgggctgacatcgaacgcgccactttcgcctttggctacggtctgcgcgtaacgccgctgcaaattgcccgcgaatatgccactatcggttcattcggtatttatcgtccactgtcgataaccaaagttacgccgccggtgcttggtacccgcgtcatggataaaaacgtggtagaaaccgtagtacatatgatggaaagtgacgccctgccgggggttctgggctgagtgccgccgttccgggttatcgtttagcgattaaaaccggtacggccgaaaagatgggtccatcgggcaaatatgacggcggttacatcaactatacggcaggcgttgcgccagcaagtaacccacgcgtagcgctggtggtgatggtcaataacccacaggccggaaaacacttcggtggttcggttgcgggtcctatcttcggcgagataatggggcaggttctgaaccacatgaacattgcgccagatgccttagtccctgaaacaccgccgacaaccgttgcttcgtccagtaaggcagtgaagttaaaagaaaaaagcgcgctcgcgccgcagtaaagaaaagcggtaaaaaagtcagtttttaacgccgagtgactggatttgtgcaggcaaattttgtacctttccgtgttattttccactgcttaaaagtgtctacccgtatgaaaaggctcttaattgttgtcgttatttttctctcggtttgcctggctgtcattgcattaaacatgcacggcaatggcccgtgggctaactgccaagcccgcaaggattaggagaacgcattttgcccaccggtaaacgttttattttaatggtgatcgcaatccttgtcggcattgtggtattggacgatgccatcgcccgcatcatccattggatcctgctaaggtaatgacaaacgagtgatttttcctcatccagccgtcgaattgcctaataccacacgttatgactactctgcccgctccgcctgcgcggcgaatttgtgtataatcatcttaacgtaactaatcattgacgagctatggcacaagatatccacctctctatcgtctgcgcactcagcaaatggatcgaaggccatttggggcgagttatccatcttgaggagctggcagaatattccggctactcgctttggcacatgcagaaactgttcaaagagtcgaccggtatctccctcggcaaatatattcgtgagcgtcgtctggccagtgcggtttatcagctgagcagcagtgattcatcgattttcgatatcgcgatggattttggttttggctcgcagtcgcactttacctacatgttccgcaagcgctttaacatcacgccctacgagttccggcaaaaccccgacgtcaaactcgatgtcgctcccccgctgcacatcattcatcagaaatcggcctgattaaaaacctaactcgctaagacccggatgatcgtcgggtcgacgcccgagcggccaatggaattttcgctcagaggccttaatcggcaaatcattgatgcaggcatagcgtgcatacattaatccctgcgggttgaacgcccaattttcgttgccgaaactccggaaccagttaccggaatcgtcatgccactcataggcgaaacgcactgcgatacgctctccgtcaaaagcccataactccttgattaacctataattgagttctttcgcccacttgcgctctaaaaatgccaccacgttctgctggccggtgacgaattcgctgcggttgcgccactgggtatcggccgaataaacctggctgacccgctgcgggtcacggctgttccaggcatcctcagcaagtcgaactttctcagcggcgctttctcgagtgaaaggtggcagcggttttttcagagtcagggggtattttcagccatcattgcctcacggttaatcaaggtaaaagattgagatgcatgtagacaagtctgtctacaccaatcacactagcgcatgtagacagagttgtctacatgtgtaaaatatccattatcagctcaccacaggatatttcatgaatacccggtcttcgcctaccgttgcacagcccgccgcacgcgaacgcattcttcacaccgcccacgatcttttctatcgtgacggcattcgtgcaaccggcattgattcaatcatcagggaagctggagtcaccaaagtgacgttctaccgtcattatccgagtaaggatgcactgatactggcgtttttgcagtaccgccaccagcgctggataagctggtttagtcaggcattacgcgaacattcagacacaggcatgcccttcctgctgcattggccgctaccctgcaagcctggttcgagcgagaggattttcgcggttgtgcattcatcaacagcagtctggaatatggcgatgcgctgccggaagtgctcaagctttctgtcgcgcacaagaaagagatggcagaggtgattgccgattattttaaggcgttctcagataaaaatcagacagcggagagcgtggcactcttgattgatggcgcaatcataaaagcgcaaatggaaaatgaggcaacgcaggcaacgcagcttgtgcagaaaatgttgaccctgctcctcagcgcgcggatgacaaactactgacccttaactcaccctgcgcccacaaaaaaacgcagccgaggccacgttttttcttatctgtgtctgtgtcaggaagtggttagaactggtaaaccaggcctacagccacgatgttgtcggtattgataccggcagcttcggtgaagtcgttatcgtgcagcaggttaactttataatccacgaaggtagacatgtttttgttgaagtagtagtaagtaccgatatcgatatatttttcgatgtcttgagtaccgaagttacccatgtctttaccgcgtgactgcagatatgccagtgatggacgcaaaccgctgtcgaactggtactgggccacggcttcgaagttgtcagccttgttggcgaaaccgtcgatgtcgttatcttcggaaccgatacgagtcaggttttcagtgtgggtgtacatcgccgccaggtagacgttgtttgcgtcatatttcagaccgccgctcgccgccgttgccttgtcgccgcgaccgtaagccagctcgttctgatcgctggtgcgatcagaactgctgtacgccgctgctgcactgatgcccatgcccagatcgtaagtcgcggaaatgccgtagccgtcgccgttagcagcctgcgctgaacgaccggaagactcgccgcccgggttgtcatttttcccctgatactgcaacgcgatgttcaggcctttaatcagaccgaagaaatcattgtcacggtaggtcagtaaaccgtttgcgcgctgctccatgaagttgtcagcggtataggtatcaccaccgaactctggcagtacgtcggtccatgaaccgatgtcatacattacgccgtagttacggccgtaatccagtgaaccccaattgccgaatttaagaccggcgaaacctacacgggtgtagctgttggcagtaccttgttcttccgccgtgtttagcgctgcctggtactcccactgaccgtaaccggtaagctgatcgctaatcttggtttggccgtcgaagccgaaacgcagataagactggtcgccatcaacgccatcattactggagaagtaatgttctgcatcgattttaccgttcaggtctagaatatttccgtctttattgtagatttctgccgcactcgcggttcctgcaattaataatgctgggaccaggagtgaaagaacgcgaagtttcatttgtctatcctcattaaagggtatcgagccgccgccactgtttcttaggtttacgtatgtttaaaaattgttaggctcgataggcagacctattctcatgataaggaatatattaatccagaaagaaaatgataccgaattagtgatagtgtttcataataataaataaatgtaacataaaatgtattttcaggaacttttgtcaatcatgtaaaggcaaaaaatacagcacgtagtgttaattaattaaaaaatcattaaaaatcaaataaatatacaaaacaaaaagcgcactaagtgataaaccaaaataaacccatcctatataatgtctctcgctatcatcattatttgttatttattactttcattatcccctgtatttggaaacaacagccggccttttggccggtttttttttgccgtttgtgcggtaattcaaacccgtcactatccccctatttacacatctttgcgtccccgcacataatttcttcaataaccttttatttcatggcggaaattaaatccttttcttgcagattatttcttttgctatgccagggtataccccctgtattgagccagtccgaatgaatcattttcctctcacggagtagaagttaagcaagaaggcggttgcatattccgttactataagagcaatcccgctgtagcgaacttcaagggtcgttacactggcacatttcgactttcgaccagctcacaaaggaatcgcatgcaacaacccgacaaccacgacaacatcgccaaggcacagatgctgctggcaacccgccgtttcctcaaactcgacgagtggctgttgtcacaaatgcgcggttggcaaaaccagaacgaggccaacaacacgtatggtctcgtcatgcatcccgataccctgttttcgaaggatgaaagtgcgacgcagcgtctcgagatcttgcgtgactgggcgcaacagtgtcccggtagctatcacgctcactgtttgatgggcatgttctggcacgagcaggcgtgggttatccgtcgtggaaatgggccggaacacgaggttgaagacgcgcagtggctcggcgcgcagctgtgctgcgactatgctgtgctgtcattcctctcagcgattgcctgccaccctcgccccacgcacgcatttcgtcacatgatgaacctcagcggcggatttggtgaaccttactggctgcgcgcgctgtttgcgggtcaacaaccaaaacccctgcatgaacagttcaatattcaaaacagcccagtatgggagcaaggcgctgcctacctttatgcgatgggcgttgcgccggccacccattggccgcagcagctccccgcagcattgcagcagacgcgtcgtaatgatgaagacgcgttagactactggctgcgaatggccatgtcagtgcgtcacagtgacgtgggcagcatggagtcgtatctgctgttccactcaaccttctggggcggcagtgacgaacaacaaaacgaaatcatcgatggcccgctgtgtgccgagttcagcgaagatgagcgaaaccagttccgcgccaatgcgctgctggatgccctcggcggcgagatagccgaccgcgactcgccgcgcgccgaacaactccagcagcggctgaccgcgcttctcaaccagccgctagagcctgcaacccgcatcgcgctgctcaatctggccggtacctgcatcgcctactggcaggacgacgatcgtgccggactgcaggtgtatgcagacctgttcgccgtttcacctcaggcgatgcccggcaaattcgctgcactgtttatttctcgcgccgtgctggcaagcgaggaacaggacggcatgccagtactcacttcactgctggtgcgcgctatcaaccgcgccgatgatgctctattgaccgcctttgccgccgccgctgtgcagttcggtctttatggcctgccgtgcgacacgtcattaagcagcggcctaatggactgcgcctggtcactgatgcagcagcaaaaaaccaccgagtcggtcggcaaagacctgctggtgctggcacacgacatggcgattaatgatgatatcgacgcgacccatttcctgatgacagaaatggcgcgtcgcggcagcgcgcttcatacctatgaactgttcttcttttatcgcaacgcctggcatcaggacgtcccggaatccctgcacaacgacagcaatgcgctggactgtgtgctgagcgccgcgcggtcaggcctggttccggcgatgttcagcgctgccaacgccctgcgtgaaggcctcggcggcgaagtggattatcagcaggcgatgcattggtatcagcgtgccagcgaagccggccacccttccgccgactactggcgcgcaagctgtgcgctcgatttaggttctgacgctgaaaagcgtgaagcggttgaggtttcactgccagctatcctcgcgcagcagaatcaccctgaacgtttcgaagccgcctacaccttgggtatggcctggatgcagggcgtcggcaccaaaaagaacaaatacatcgcctggcagttgatgaacttcgtactggagttgaatcctgaatccgaggtagcgcgtcaggccattatccagctcgaagggtcgctgcgcgcgcgcatgagcctctggcaggacaaacgtaaggttgaaggcgtcgatttcaccgcaccttatcgccagagtagcgcgcctcaactgcccgacgcctcacacgagccgcagcatgtagattaggacgacaggaaataacggccccacggcctttctgctacaatactcagccagttttagcccatactggctttttttattgaaagatagcggtttatcgataagtattcgttatatcctgtaaacggatttcacagaattataaaaaaggattgacgactacatgccagcagaatcgatgatagacctttcacgggctcaggctcagcctggaaaagcccagcagatagcgacacgaattatcttcctgctttcagggtttgcgatgtccgcctgggcgccgctggtccccttcgtaaaaattcgcctcgacatcagcgacggcacgctgggcctgctgctgctgtgtatcggtgccggttccaccttttccatgccgctaaccggcttcctgaccggaaaactgggctgtaagacggtgattttgctcgccactatcgtactgtgcctcgacttgcctttactgacgttgatggacacgactctcggcatggcgctggtactgatcatcttcggtatgtcgattggcatggtcgacgtagcgatgaacgttcacgcagtggtggtcgagaaagccagcgggcgcgcgatgatgtcaggttttcacggcttcttcagcatagggtgtattctcggcgcgctggcggtcagcggcctactctccctggcgctgacgccgtttcttgccagcatcgcggtcattgccgtggtgttactgtctttgcttggcatcagcaaacacctgtggcacgacaccaaaagtaagcaaggcgatccgatgctagtgatgccacgaggctgggtgatcttcctcgggttactgtgtttcgtgatgttcctgaccgaaggcgcgatgctcgactggagcgcactgtttctcatcaccgagcggagcgtggatccacacaacgccggtctgggatataccgtctttgccatcgcgatgaccctcgggcgtctcaccggtgacaaggtcatcaactattttggtcgttttaaagtcctgcttttcggcagcctgatagcctgcgcaggactgcttctgtctgtaggcgtagatagcctgtatgctgtagcagccggttttatcatggtcggcctgggtgcctcgaatttggtgccgattatgtttagtgccgccggtaatcaaaccagcatgcctgccaacctcgccattgcgtcggtgacgacattgggatacgccgggatactggccggcccggcactggtcgggtttattgcacaattgagtaatctgtcgattgcattgagctgtgtcgcggtcctgatgctgatggtttccgccagcgcacgcgccgtgactcgctaaacaaggaaaagcgtcaccaccatgccaagtaaatatttatcgctgacttcgaccaatattacgcgatttttttggatcttcattctgctgctggcaatggggcttggcctctatggctataactacaccaatgcgtatctcaacgataagctgagaacgctgcaatacaccggcgatcgcctgcaaaagcgtatcgaccactatcgctatctgacctatcgcatttacgataactacaccggtcagccactggcgcagatcccggccaacgtgcaggaagtgaagctgcgtcaggatatgttcttcattaacaagccgcacaaaaaaaccgatgcgctgatttacggcactcatgacgccgccacgctcgacctgacgctaaaaatctccggctttcttgacgatcagtgggggcgaaaaatcagccctactcgatgtattatctgaacggtcaggacaacagcctgatgttcattaccacgcagccgctgcaacagcaggactcgcgtctcaaagagaactatttctacgccgggatgcaggcgcgccgcgcagagatgctgcaacaggccaatacgctcgacgagcgcgagagctattccagcctgcgcaaatcgcgtaactccagcgactatttcttctcgctgcgcaccacctttaacaaccccggcaatcttgcgacggtgattgcattcgatctgccgatgagcgatctcgtgccgcagagcatggcccgagacaattttcaactgaccaataacaacgacacggtcaactaaggcgacgcacctcaggatccaaacgcgggcagcacgattacgctgcaaggcggatcaattaacctcagcacgccgttgagcaactcgccgctgaacctgacttacagcattccggtgctttcactggcgattgatctcacccgcaacaacttctggctgatcctcatcaacctgatcctgctcggcatggcgatggccggtatctatctgattcgccataaatatatccgcccgagcgagaacatggcccaccagttgcacacccagcaggcgctgaaccatgagataatctctaacctctccgtcggtctgcttatctataatttcagcagccacagcgtggtggtcagcaacaagattgctgaacagctgttgccgcatcttagcctcgacaaaatcgccaatatggccgaagaacatcacggcgtgattcaggcgacggtcaacaatgaagtgtatgaaattcgcatggtgcgcagccaaatagcgccagacacttacctgttcatgatgcatgaccaggacaaagaggcgatggtcaacaagacgctgcaacaggcgcgccgcgagcatgaaaagaatctgcaggcacgcaagctgatgctgcacaacctgggcatcgaactcaatcagccgctgctcgaactgcacgcgctggctgaacagttgaacagcaacccaccggtcgaagaccgcagcaagctggagaaaacgctgctcggcgagtccaaggacgtcctcacgctggttaataatattaccctgctcacccgtctcgaaacgcaggactggcagccggttcaacaacgctattcgctggccgcgctgatggacgagctgctgctcgacgcactgcctaaaattaaccagaaaggcctgatgctgctgaaccatttcgagatggatccgctcgacagctacgtcggcgatccgaatgcggtgaagaagatcctcgcgctattgctcgattatgccatcgtggctacctcgcttggcaaaattacgctgaccagcgaacgggatccgcagcagccggaccagctgattttccacattaccgacaccggcagcggcctgtcgaaagaggagttgagcaacctcaattatccgttcctcagccaaacgctggtagaccggtttaatcacggttcggggcttaatttttacctgtgtaatcagctgtgcaagaagctcggcggtcagctcgagatacgcagcaaaatcgatatcggcacccgttatacggtgcgaatcaaacaaacgcttgaagcggtggatactgaggtcgaggcggcggacgaaaggctgctggacgacgtaactgtgctgctcgacatcacggcggatgaggttcgcggcatcgttacccgcatcatgagcgcctacggtgcgatttgtatcgtcgccgacgagcgccagccaacgcgggattacgatgtattattaaccgataacgcccaacactgtgaccactatacgctgttgctaaccagtgacgagattggcttccaggccctcgaaaaacgctacatacgcgtcaacttcaacatcggcagtgcgctgatagacgcaaccttactgttaattgaacagcagctgctggaagaggcggaaaatgaaatcgcgctttcacagcagaatagcagtgccgattcaactaacggtgattcagattccggtaccggcgacgacgaaatcgaagcctatgttaaacagctgcataccagcgactattacggccttttcgttgatacagtaccggaagatatagagaaactgtataatgaaaatcaacgtcgtgattttacatcgctttcccagacagctcatcggcttaagggagtgttcgccatgctgaaccttacaccggggaagcaactgtgtgaaaaattagaacagcatctcgccgaaggcgaagtgttgatgatctcagacaatattaatcagattgattcttttgtctccagactgctgcagcaaggtagctaatcacatgaacaatatgaacgtaattattgccgacgaccatcctatcgtcttatttgggatccgtaagtcccttgaacaaattgagtgggtaaacgtagtaggcgagttcgaggactctaccacgcttatcaatagcctgagcaaacttgatgcacacgtgctgataaccgacctgtctatgccaggtgacaaatacggtgacggcattacgctaatcaaatacatcaagcgccactacccacagctgtctattatcgtgctgaccatgaacaacaacccggctatcctgagctccgtgctcgacctggatatcgaagggattgtgttgaaacagggtgcacctaccgacctgcctaaggcactggccgcgctgcaaaaaggcaagaagttcacgccggacagcgtttccaaactgctggagaagataagcgccaacggttacggtgacaagcgcctgtctccaaaagagagtgaagttctgcgcctgttcgccgaaggtttcctggtgaccgagattgcccgcaagctgaaccgcagcatcaaaaccatcagcagccagaaaaagtcagcgatgatgaaattgggcgtcgagaacgacatcgccctgctcaactatctgtcttcagtcagctctacgccggttgataaagactaacgttcagcgccgtgggccagaaaagaaaaaaggcacaatctagattgtgcctttttttatgctctgaattcaggatgataacggcctggcgccctgcccgctgatgcgtttcctgcgcacctgctggctgtaatagctcagcgttttgcgcagttggtcgagcgtcaccggcttggacagacagttgtccatgcccgcttcgagacagagctgcttctgctccgccagcgcattggcggtaaccccgataaccggcagcataaactccaactcacgcaggcgcttggttaaaccatagccgtcgagttttggcatgttcacgtcgctaagcacgatatcgaccggatgaaccttcatcgcctcgagcgcgtccaggccgtcgttggcggtcacgacgatgtatcccatggacccgagctggtcggccagcaggcggcggttaattggatggtcatcgaccaccagcagcgtgatatcaccgttatcctgtgactcgacgacctctggcagcaacgcgatattattctcgttaacctcattcagctgataaatgcggttcaacaacagcgtgatctccagcggcgtagaggtactgtggatccagtaacccgggctgctttcctgcggtggcccgatgtggtcgatggaaaactcgatttgtgcacagagcgcgccacggtgaatgagcggcgtatcgactatcaatatgtcttcggcgaaggtttcgtcttccgcattccagcgctgaacgttggcaccgtggtgatgcagcagctgcatcaaatagctttcgagatagccgttgcggatattcacccacagacgtttaccggcccagaacgctagcggcggtggcgcaggatggacttcgccgtagattggcagtcgcacggtaaaggcgctgccgagccccggttcagaatcaacggagatatcgccatccatcaggttaatcagcttttcacagatagccagccccagtccggtgccctggaaatgacgctgtaccccacttccgacctggaagaagggatcgaacaggcgggtgatctctttggttgggatcccacgccggtatcgcgaatcataaactccagatagttgccgcaggtgcgcgcgtgcagcacgatgcagccggtatcggtaaacttgatagcattgttgaggatgttcgacaacacctgctgcaaacgtaccggatcaccgacaaaaatctcaggcacgttgtgctcgatgaagcagtacagcccgaggtgcttcttcaccaccagcggcagatagttgcctgcaatgtgagtgataacttcgcgacaggagaattcctgcggctcgatttttagctgctcggattctattttcgagaaatcgagaatatcgctgatgatcttcagcagcagcgccgacgagttattcatcgccgtgaccagtcggtcaacgccctgcggcagcccttgcgtttgcagcagatcgaggttaccgataatgccgtacagcggggtgcgcagctcgtggctaacggttgccaggaacatcgacttcgactggctcgcctgctctgcggcattggccatttcgtgcagcgactcttccatcttcacgcgagcgctgacgtcaatcagtacacagattgctacgtcctcgttgcgataacgggaatgcacaaagctgagctgtatgttgttgttgtcacgcgtgatgatgtccacgaagcgcgtctgttggtcgcagatgatgcgcgtgatgcgctggcggtcttcgtgcgtcagcatgctgatgtagttgtgcgccagttcgttactgaggatgttgacccatcgctgatgcgcaaaattgagatacccaccggcgcagaagcgacgattttatggttgaactgctcgtgttcctcgaggcggaaagcgttctcttctgcgggcaggaacatttttcgctcaaacagccaggccagcacgaacaacagcaatgccgagaaaacgttaagcacaacagcattaagaatcagcagcttaaagcgttcgatcaccgttttgaacggcaaagaatagaccacgctcagcccggagggtggcaacggtttcttataaatcagatcgttatagccgttcatgtagccgaaataactttggccggtcggataattgtcgaggatcgacgtatagcggtctccctcaaggaaactcagcagcggcacgccttcgctgtcgagcagcgttacgccagtatgcgaggagctggagacggtgaaatcttccagacgcagcgtctgctgcacgcccatcagagcctcgagcttgttaccgacgtagattggcgtcagcacgtacaggttaccctgctctttgttatttcccgcctcaacccagtattggcttttctgcttgtcctggctcttgctgttgcggtatttgatcagtttatcgtgcagggttttgagaccgttttctcgttcaatcggcgtcgcgctgtccatgacaccgaaatcaaccagacagagattctccccgttaatgtagaacacccgcttgagggagtaattatcggagaagttgtccttccagtagttaatcgtattacccagcgacgccagcgagttgcgtttgctgtcggtcagttgcgaacagttggattcagggaacagcgcgtgatagctcggaataacattcttggtgctcaacacgccattgattaagtcgaggccgttaatcgaatcaccgaggcgcttttcagccatcgacctcacgctacgaaccacttcggcggtatttttaatgtaggtttgcgcctggttgtagttgaggttgtcctcttcgcgaatttccgactctttattgtggaaaatattcagcacataaaatgtcgtcagcagtgcgccgagcgaccaaagcatgatagccagtaccctgaagaggtaacgggaaattcttaatgccgttctgaacgaggttaaatacttcaagcggttaccattgctgaaacgtaaaatgaaaaggaaaagggcacaatatgtaacccatattatgccctttgtcgctcaacctgagaaatcgattttattcgtcttctgaaggttgctcgtcgtcttctgcttcgatatcgtcaggtgcttcgctttcctgcgcagcttccagttcaccttccactgttgctacgccgtccagttcttcatcttcaacaggttctgcaacgcgctgcaggccgaccacgtgctcgccatcagaggtacggataagcgtcacaccctgggtgttacggccaaccttgctgacttcggaaactcgggtacgaaccagcgtgccggcgtcggtaatcatcatgatctggtcggcgttatctacctggatagccccacaaccggaccattacgctcactcaccttgatggagataacgccctgcgtcgcacgagatttagttgggtattcgctggattcggtacgcttaccgaagccgttctcggtaacggtcagaatggcaccttcaccgcgaggaataatcaacgagaccacgctgtcgctttcgcccagacggataccacgaacaccggtcgccgtacggcccatcgaacgcactgcctgttcggagaagcgcaccactttaccggccgcagagaacagcataacttcgtcattaccgtctgtcaggtcaacaccaatcagctcatcaccctcattgaggttgatagcgatgatgccagcgctgcgtggacgactgaagtcggtcaatgcggttttcttcaccgtgccgctggccgttgccataaacacgtgacggccttcttcatactcgcgcaccggcagaatggcggtaatacgctcgttcggttcaagcggcagcaggttgacaatcggacgcccacgggcaccacggcttgcttccggcagctgataaaccttcatccagtacagacgtccacggctggagaacatcaggatggtgtcgtgggtgttagccaccagaagacgatcgatgaaatcctcttccttaatacgtgccgcggacttgcctttacccccgcgacgctgcgcttcgtaatcggtcagaggctggtacttgacgtagccctgatgcgacagcgtaacgacaacgtcttcctggttgatcaggtcttcgatgttgatgtcggaggtattggccgtgatttcggtacggcgcgggtcgttgtactggtcacgaatagcttcgagctcttcacgaatgacttccatcagacggtcagggttttcgaggatgtagatcagttcagcaatctgcgtcagcagctctttgtactcgtcgagcagtttttcgtgctcgaggccggtcagtttctgcagacgcaggtccagaatagcctgagcctgttgctcggtcaggaagtacttaccgtcgtgaataccgtactgcttttcgagccactctggacgcgcggcgtcatcaccggcgcttgccagcatggcggacacgttgcccagatcccatgaacgcgcaaccaggcccgctttcgcttcggcaggggttggcgcagcacggataagctcgatgatggggtcgatgtttgccagggcaatcgccaatgcttcgaggatgtgcgcacggtcacgagctttacgcagctcgaagatggtacggcgagtcaccacttcacggcggtggcgcacgaacgcagacaggatctctttcagacccagaatctttggctgcccctgatgcagggcaaccatgttgataccaaacgaggtttgcagctgagtgagtgaataaaggttattcaacaccacttcgcccaccgcatcacgtttgatctcaatcacgatacgcataccgtctttgtcggactcgtcgcgcagtgcgctgatgccttcaagacgtttttctttcaccagctcggcaatcttttcgatcaaacgagccttgttcacctgatacgggatctcgtgaacaatgatggtttcacgaccggtcttcgcgtcagcttctacttcagcgcgggcgcgaatgtagattttaccgcggccggtgcgataggcctcttcaatgccacgacggccgttaatgatagcggcagtcgggaagtcaggacccggaatgtgttccatcagcccttcaatgctgatgttttcgtcttcgatataggccagacagccgttgataacctcggtcaggttatggggcggaatgttggtggccatacccacggcgataccagaagaaccgttaaccagcaggttcgggatacgggttggcataaccgccgggatttgctcggtgccgtcatagttcggcacaaagtcgacggtttctttttcaaggtctgccaacagttcgtgggcaatttttgacatacggatttcggtataacgcatcgcagcggcggagtcgccgtctaccgaaccgaagttaccctgcccgtcgaccagcatgtagcgaagggaaaatggctgggccatacgaacaatagtgtcataaaccgcggtatcaccgtgcgggtgatatttaccgataacgtcaccgaccacacgggccgatttcttataggctttgttccagtcattacccagaacattcattgcgtaaagtacgcggcggtgcaccggtttcaaaccatcgcgcacatctggaagcgcacgtccgacaataacggacatggcgtaatccaaataagagtttttaagctcttcttcgatgttaatcggtgtgatttctctggcaaggtcgctcatggagctgctatccctctctgattattcatggccgctgcccaaaaataccttaattactcaaggtataggcaaaggtgtcaaactatagcacgaagctgcctctcggtccctagaatatgtataatcggcttcacaaggcataaggagtttatcagcccaatgacaaccacaccgaacagcaaacaacacactatcatttcgcaaaacgtggatacccaaaacgtagatcagtccgaaatcgccaaatttgaggccgtcgcctcacgctggtgggatctcgagggcgaattcaaacccctgcaccgcattaatccgctgcgcctgaactacattctggagcgttcgaacgggcttttcgaaaagaacgtgctcgacgtcggctgcggcggcggcatccttagcgaaagcatggcctccgcgggcgcaaccgtgaccggtctggacatgggcgcagagccgctcgaagtcgcccgcctgcacgcactcgaaagcggcgtaaaggtcaactacgttcaggaaacggttgaagcgcacgccgacgccaatccgcagcgttatgacgtagtgacctgcatggaaatgctggagcacgttcctgacccggcctcggtcgtggccgcctgtgctcgcctggtcaaacccggcggtcacgtgttcttctccaccatcaaccgcaacaacaaagcctggctgatggcggtgttcggtgccgaatacgtattgaagatggttccgaaggggacgcacgacatcaagaagtttattaaaccttccgagctgctctcgtgggtagacagaactcacctctacgagcgcaacatcatcggattgcactacaacccgctgtcggatcacttcaagctgggcccgaacgttgacgtgaattacatgctgcacacgcaatcacaggaaactgctgaaagctaagcaccagtcaagtcatttaccgccctctggccgctgcacacgttgaggtattcacgcaggcgcggccagacttcaggataaaagcttagtttttagggcattggcctgtccaacccctgcaacatgattttttagaatagtttttggtgccaatatagcgtttttttctaacgtttaataaatcggcagtcgatcggcttttagaaaaatataagaaaatcgtatcgtagatattgacacttctttaagcccagttgcgatgggcactccggagaaggccagcgattttctccccaacttatccacaaaacgcggcagtttcatgccttgcaaaagtgtggatcgatcactatcttgtcatcagaaaataatacacccacaatatattgtgtttatatcctgagcagcacactaggcttggtcggcaaaatttcgtccgacggtgcctttttgtgtttttgtcgtcagttgctttataaacctttaaggtataatcccgaatgaatcagagtctacttgttactaaacgtgacggccgtaaagagcgcatcgatcttgataaaatccaccgagtcatcgactgggcagcggaaggtctccaaaacgtatcagtttcccaagtagaactgcgctcccacatccagttttacgatgggattaagacggctgatattcatgaaaccatcatcaaagctgccgcagacctgatctctaaagacgcgcctgactatcagtatctggccgcgcgcctggctattttccacctgcgtaaaaaagcctacggccagttcgaaccgcctgcactgtttgaccaggtcagcaaaatggtcgaaatgggcaaatacgataaacatctgctggaagactacacccgtgaagagttcgagcagatggacagttttatcgatcactggcgtgacatgaacttctcctatgccgcggttaagcagctggaaggcaaatatctggtgcagaaccgcgtcagcggccaaatctatgaaagcgcccagttcttgtacattctggtcgccgcgtgcctgttctccggctacccgcgtgagacgcgtctggactacatcaagcgtttctatgatgcggtttcaaccttcaagatttctctgcctacgccaatcatgtccggcgtgcgcaccccgactcgccagttcagctcttgcgtactgatcgagtgcggcgacagcctggactccatcaacgcgacctccagcgccatcgtgaaatacgtttcacagcgcgcaggtatcggcatcaacgctggccgcatccgtgcgctgggtagcccgattcgcggcggtgaagcattccataccggctgtatcccgttctataagcacttccagacggcggttaaatcctgctctcagggcggcgtgcgcggcggtgctgcgaccctgttctacccgatgtggcacctggaagttgaaagcctgctggttctgaaaaacaaccgtggtgttgaaggcaaccgcgttcgtcacatggactacggcgtgcagatcaacaaactgatgtatcagcgtctggttaaaggcggcgacatcactctgttcagcccgtctgacgtgcctggcctgtacgacgcgttcttcgccgatcaggacgagttcgagcgtctgtacactcaatacgagcaggacgaaagcattcgcaagcagaaggtgaaagccgttgagctgttctccctgatgatgcaggaacgcgcgtcaaccggccgtatctatattcagcacgttgaccactgcaacacccatagcccgtttgaccccgctattgcaccggttcgccagtccaacctgtgccttgaaatcgcgctgccaaccaagccgttaaatgacgtgaacgacgaagaaggggaaatcgcgctttgtacgctgtctgccttcaacctcggcgctatcgaaagcctggatgatctcgaagagctggcgacccttgcagtgcgtgcgcttgacgccctgctcgattatcaggattacccaatcctggccgctaaacgcggcgcaatgggccgccgtacgctgggtattggcgttatcaactatgcttattatctggccaagaacggcgtgcgttacagcgacggcagcgccaacgccctgactcaccgcgcgttcgaagcgattcagtactacctgctgaaagcctctaacgaactggcgcgtgagcaaggtgcctgcccatggttcaaagagaccacttactcgcagggaattctgccgatcgacacctataaaaaggaactcgatacgctgaccgatgagccgctgcactatgactgggaagcgctgcgcgccagcattaaagagcacggcctgcgtaactccacgctgtctgcgctgatgccgtctgaaacctcttcgcagatttcaaacgccaccaacggtattgaaccaccgcgcggccacgtgagcatcaaggcgtctaaagacggtatcctgcgtcaggttgtgcctgagtatgagcgtttgaaagaccagtacgagctgctgtgggatatgcctaataacgacggttacctgcatctggtcggtctgatgcagaagtttgtcgatcaggcgatttcgtctaacaccaactacgacccatcccgctttgcaagcagcaaggtgccgatgaagcagctgctgaaagacctgctgaccgcctacaagtttggcgtgaaaacgctgtactaccagaacacccgcgacggcgcagacgatgttcaggaagacatgaaggctgaagttgacgactgcgaaagcggcgcctgcaagatttaattgctcaaattcaaaaaacgcctctgaaaagaggcggttttttcagaggaagttatggcatataccaccttttcacaaaacaaaaacgaccagctgctcgagccgatgttcttcggtcagtcggttaacgtggcgcgcttcgaccagcagaaatatgaaatcttcgaaaaactgatcgaaaagcagctgtccttcttctggcgtccggaagaagttgacgttgcccgtgaccgtatcgacttccagggtctgccggagcatgaaaaacacattttcctgagcaacctgaagtatcagacgctgctggactcgattcagggccgtagccctaacgtggcgctactgccgctgatctccattccagagcttgagacctgggttgagacctgggcgttctccgagactatccactcacgctcgtacacacatattattcgtaatatcgtcaacgatccgtcactggtgtttgacgatatcgtcaccaacgaagagatcctcaagcgtgcgaaggacatctctggttactacgactcgctgatcgagatgaccagctactatcacctgctgggtgaaggtacgcatcaggtcaatggcaaaacggttgtggtgaacctgcacgagctgaagaagaaactctatctgtgcctgatgagcgtcaatgcgctggaagccgtgcgtttctacgtcagcttcgcctgttcatttgccttcgcagaacgcgagctgatggaaggtaatgcaaaaatcatcaagcttatcgcccgcgacgaagcgctccacctgaccgggactcagcacgcgctgaacctgctgcgctccggtgccgatgacccggaaatggccatcatcgccaaagagtgcgagaaagagtgttatgacctgttcgtgctggccgcagagcaagagaaagactgggcagaatatcttttccgcgacggctcgatgatcggcctgaacaaagacattctttgccagtacatcgaatacatcaccaacatccgtatgcaggccgtgggtctgactgcaccgttcaagactcgctcaaacccgatcccatggatcaacgcgtggctggtgtctgacaacgtacaggttgcgccgcaggaagttgaagtgagctcttatctggtgggtcagatcgattctgagatgaatgctgacgacctgagtgacttcgagttctaagcattgagtcagcctaccgttacactgcacgatttcggcaaaacgctcgtctgcgaggacgagcacaacaacctgctggaagtcttcgagcggaatcagttgatggtcgagtatcagtgccgcgaaggttattgcggctcttgccgcatgcgtctggttaaaggtgaagtggcttatagtcaaaagccgctggcctttatccaggacggagatattttgccgtgctgctgtctgccggtaggggatgttgagctgacgctttaacctctcctctcaataattgcccactctgcgcgacaccctttaccctaaactgcccataataaaacctctgcgttccttggtaattttcaaaagtcccccctgtttaattcaatatatattttaataagcttaagtcgatattaccggctcggtcgtctacattttcgacaatacgggtcagtaatgtctctggtctcaaaaaagcttaaagagcacgggtttcaacctgattatgtgttggctgcacccgctgctgggcggtgagcgtaaacggctcgattatctactgaagttgacatgactacgatatcgcgtgggccacggtagtcaactggagaccctgcaggcgcagcaggaaatggataatcatgacaattatcgtgagagattattcaaacaacaccaggcagaaaatcgcctgaatagacacctgagcgagatgcgttttttctcgccacaggtggataattttgaaattgcgctcagtcacagacacggcaaacatagtgtctgcgctggcgagagaataattaccaaatactgatgactatactttttccaatactttcaaccacggataatcggccactaccgaccagtcattcagataacgacgcagcatatccatcgccatcattgctatcgtctcctgacgcagctcgaggccatggcggccggcagtatagtgaatcgtcataccgcgcgtgccgcccggcgtatgcagtgcgaggctgaggcggtcttccgataccccacccaccgccaacgccagctgtgcaccggttttgtcggccagaagctgtgcgcgcgccagcagtgcagacaaggattcatcttcaccgtgcgtcggcaacagttcgccaccggccagcggcactccggcgttttgcatccgccagttgagcagcccaccggtatagctctcgctaattgccagacgcaaattctgcgtcagcaaacgttcggcaagtcgtgcaggcagtccgcccacgccttcaaaaatggtgctttcaccggccacctcgcgcacacgctcccaggctttacgcatgctggcttcctgactgcgcggtccggtcagcttcagctcgataatcggcgacgatgaacgatagcccatcaccacgccttccggcagcgcctgcccgtccagctcactggcaaggtcgctctcggaacgtccaaaggtcgttaaacgcaggcacagcggagcctccagcgcaggaaacgccttgtgcagccgtggcactatctgctgctcgaccatgaccttaaattcagagggtacgccaggggtaaagaacatttggcagtggttgagcttcaacgtaaagccgcacgccgtgccgaccgggttgtcgagcacctcggcattggccgggatctgcgcctgcttgcggttcgactctgccatcggtctgccacgttgagcaaagaacgacgacatcttggccagccaatccgcgtcttcaatcagctcgacgccacaggcggtcgccgcggccagtgagctcagatcatcactggtcggcccgagtcccccattgacgataagcacgtcagcaatgtggctgcgctcggtcaagacagcaaccagcgcctcaagactgtcgccgacggtctcgcggctggtcattggcaacccctgttcaaacagatagttagccagccacgcagaatttgaatcgacgatttggccgtgcagaacctcgtcacccgtactaagcatctcaaccctaagcattaccctctccttaaatcacataattattgctttagaaattcaccgctccgccgaggtaagcaccgtcggcaatgacgttatcgcgatggccgtctttaccgttcagcgcctgataacgataacccacgtcaatacttaccagactgattggcgagaagcgaataccaccggtggcttctttgtagttgttgatgccgctggagagtgaatccggcgcgtaataagcattaccatacaggctcaggtaatgacccagtggcagttgcagtccaccaccaatcggtacggcgtaaccgtcactgccgtctttagggctggtgtagagtgctttagcccctacagtcgccatcactggccccaaaccaatattgtagccgagcccaagacctgtgacgtcgccgtcgcgatcgctatgggtccagtcgccggtcagcgccagtcccggcgtggtgttgcccagaccaaagcccagactggtgtagtgttggccaacttgagcattaatgccaatcgcgtgagcggaaacggtggtcatcatcagtgcggccgccgaacaggcaacgagatattttttcattatttatcctgaataatcataaaactataaggtgtgatactcatcgcgagtctaaagcaattttctggcagagtaatcaggccaaatccttaaaatttatttcctccataaaaaaagccctgacatgtcagggctttcgtcttaatcgataaacattagctaacggtttttatcatactctgctggtaggcccgctgacgggtgacccaaggcagcacgacgattgccatcaggccacacaccgccgagatggacaaccacacgcccggcatcgctttgttgccggtcacgtgaatgagatagctggaaatggccggcgtaaaaccgccaaaaattgcggtcgccagactgtaggccattgagaagcctgtcgcgcgaacctccgcaggcatcacctcggtcaacgccaccaccatcgccgagttatagctggcatacataaatgacagccagagttctacctcaagcaggcgagcgaagcttggcgccccgaccagccagttcagcgccggataggaggtcagcaggataagcgtgctgaaggtcaggagcagaggacgacgccccactttgtcggagaatgcccccatgataggcagccagaacagattcgagactccgatacacagcgtcacgataaagctctgctcttcgctaagcagcaacacgtttttgccgaaggtcggggtaaaggcggtgatcatgtagaaagagacggttgtcgtgaccaccatcagcatccctacgagcacaatttgccagttggccgcgacggaacgggcaatctctcccatcgaaggatggtgtttacgctgctggaaggcgtcggtctcttccatcatacggcggatccaaaacaggaacggcacaatcatgcagccgatcgcgaaaggaatacgccagccccactcgttcatcacgccattacccaacaggtgattcagcagcacgccaagcagcgcggcgaagaccaccgcaacctgctgactcgcggactgccagctgacgtagaagcccttcttacccttcggcgcaatttcggacagataaaccgatacgccacccagctcaacgcccgcagagaagccctgcaacaggcgccccagtagaatgaggatcggggctgccacgccaatgctgtggtaacccggcacgcaggcaatggtcaaggtaccgaacgccatcagcccaagagtaataagcagccctttacgacgcccgtgatggtcaatataggccccagtaccatggcacccagcggacgcatcaggaagccagccccgaaggtcatcagcgttagcattaacgaggcgaaaggattggaatcggggaaaaaagtatgggctatcgcgttggcgtaataaccaaacaccataaaatcatacatttcgaggaagttgccgctggcaacgcggaagatatttgcagccgtaccctgcctgctaccgccagaggcggtattaatggatgacattgtgttcactcctgctttctatttacctccagttaaccctatctttatcattactcaatgtgatgctattcacactttttagcaggccgtttgtttttaggtaacatgatattaacccacacttttctttgccccatcagagagcacaggcaaaaaaaagagacagccttagctgtctcgttgcatgtattttgttcattccgctaagaaatgatattgcaggttatcggcgcacaagcagaccgataaccaaacctacggcggcaccgacgccaacaccgtgccacggtttgtcgtgaacataggtatcagcctgacggactacggttttcgctttggcacagtaagaatcggtggccgaactcagacgtgattgcacgtcactcaacgcctgttcggctcgtgactttatttcgatgtatttttcatccgctttatcaccagaagacttaagcacctcttccagcgtttcactaagcattctcaggtcatcgtcaagactggtttgctgtggttcgaattggttagccattcttttctccttatgatgtatttcagcgagttagtgcgcatggcacgctcaacccttgcctaataaccctagcctacttttcgacgcgttgctgacggaatgacaattttagcggcaatgccgggtattttaagaaccttccgacactgatttcaccttagcgtaaaaagcgggacgaaaaaaaaccgcacatccaggatgcgcggttttgtggttgccgttttaacgttagaacagcggctgagccagctgtaccagcgagataagcggctgcggatagacacccagagccaataccagaatggcggagataagcacgactatgccgcctgcggtaaacgcccagttatttggggtatcgcgaaccagtctttctggcgcattcaggaacagactcacggtcacgcgcagatagtagtagaggccaattgcactgccgatgaccactgcaccggtcaaccaccacagatgcgcggtcacaccggtcgcaatgacgtagaacttaccaataaagcccagcgtcatcgggataccggccagtgacagcatcatcaccgtcattaccgcagacaggattggcttgtgccagaacaggccgcggtaggagaacagcgattctgcatccggaccgctgtacgggctagacatcaggctgaccacaccgaaggcacccaggctgctgaacagataaccagccagatagacaccgacagtttccatcgacagctggtgcgtctgcacggcaatcagtgccaccagcagataacccagatgtgcgatggaggagtaacccagcaggcgcttgatgttgctctggctgatagccatcaggttaccaaacaggatcgagcagaaggcgatgacgcccagcacgacacggatggcttcactgttggcaaccggcgcgtagaggaacaggcgcataacgacggcgaaaatcgcaatcttgctggcggtagccaggaaggttgagaccggtgcaggtgcaccctgatacacgtccggcgtccacaggtggaaaggcaccaacgacagcttgaagcccagcccgacgatcatcatgcccagaccagccagcagcagcggctggtgaatcaccgcgtcgccgagatttttgcccagtgccgcgaacgacagatcgcccgattccgcatacagcagcgccataccgaacagcaggaacgacgacgccgcggcggacagcagcatgtacttgatgctggcctcgagcgagcgtttctgacgataggcgtaacccaccagaccaaacaacggcagcgaaatcagttcgattccgaggaacattgaggccaggtgattggcataagccaacagaataccgcccattgccgcaatgagaaccaacaggtagaactcttcgcggttgtcagggtagccctcaagccatggataggcgaaagtgctggtggccagactggcgagcagcaccaggccaatgtagaacatggaatagccgtcaacacgcagcagtggggttacgtcctgcggacccactttagccacgaagtacagcgaaagcagcgcaaggttaaggccaatcacggtcagagtggcattaacaaaatggtcgcgtcgccacgcaatggacagcatcaccacgaccaccgtcaatccgacgatcaacagtggtaacagtgcgatcagattttgaggagtaaatgtcatggcgaattacggccttgtcgttgaaattgatgaaactgatgacccgaaccagtgctgaatattgctcatcgctgcgcttgaggtatcgaggattggctgcgggaagaccccgagcaataccagcaatacgaccagcagcaggatgattaacagctcacgcgccgtcatgccctgcaaaggttggtccgacttaggcgcgccatagtacgcacgctgcatcataaccagcgaataaaccgacgcgaagaccagcccgaaggtcgaaatcacagtgatgaccggcacaatcgggaagctgccgaacaggatcatgaattcaccgacgaagttaccggtacccggcatccccagcgtcgccaccgcgaagaacagcgacagcgcaggcaggtatttaattcgcccccacaggccgcccatcagacgcatatcacgggtgtgcagacgttcgtacagctgtccgcagatgatgaacataccggccgcagagaggccgtgcgcaatcatctggataaccgcaccctggtacgctaactggctgccggtaaagatggcaatcagcacgaagcccatgtgcgacacgctggtgtaagcgataaggcgtttgatgtcggtctgtgcgaaagccatccatgcgccgtagaagatgcccaacacgccgagccacatggcgataggggcaaactcgtgcgacgcattcgggaacagcggcagcatgaagcgcagcatcccgtaggccgccgtcttcagcaagatccccgccaggtccacggaacccgccgtcggtgcctgactgtgcgcgtccggcaaccagccgtgcagcggcaccaccggcatcttgaccgcgaaggcgataaagaagcccagcatcagcaggtattcgacgttgtgcgtcatcggggttttcagcagttgttcatagctgaaggtccagacaccggtcgcgttgtagtgcacgaagaccagtcccagaatcgcaatcagcatcaccagaccgctggcctgggtatagatgaagaacttggtcgccgcgctgatacgcgttttaccgtctgacgccttgtgaccccacagcgctatcaggaagtacatcggcaccaacatcatttcccagaagaagaagaacaggaacatgtcgatggagaggaacaccccaatcacgccgccgaggatccacagcaggttcaggtggaagaaccctgatacttctggatctcgcgccacgaacagagaatcgccagtacgccgagcaggccggtcagcaccaccatcagcagcgacaaaccgtcgagcgccaggtggaagttaatgccaaagcgtgggatccacggcaccgaaaactcggattgccactgtggaatgcccttcggcgccgttaacgagtacccaccctgcagccacagctgaagggaaagtgccaaggtcagccccatcgcgacgagtgctatccagcgaggtactttgcttccgaagcgctccgtctgccaacacagcagtccgccaataaaggggataaaaattagccaaggtaatagcatggcgtagaggtccctatgtttttaaatcaccagtaacagcgctaaaacgacgactgcacccaatcccatcgacgcgacataccaccgcgtctgcccgttttcgctcaatgtcagcccacggttacccaagcgggagaacacggcaggaatattcattaatgagttcaacggatcgcgttgcaggagtttcgcgacacccagatagggtttcacgaaaatcatgtcgtacagccagtcaaagccccaggcatggaaccaccaggtcgtgaagaagcgtcccggcgcgctttttgcgatgctgttaaccagcgagcgcttgccgagatacagtgccgcagccagcagaatgccgacgatggcgactatgcccgaggtgatttcaagcttcaatactgtgccgtgaggcagttcggtggtacccggcaacacgccctgcagtggcggaacaatcatcgcgccaatgaaggtagacaggaccagcagaaccagcaggggtaagtggtgagtaatccctttaccggcatgcgctttaattttctcttcgccgtggaagacgataaagatcatgcggaaggtgtaaagcgaggtcataaacgctccgaccagccctgcgaggagcagatcgatatggccattagccagcgcacccgccagaatttcgtccttactgaagaagccggcagtgatgattggcaaggctgacagcgccgcgccccccaccaggaagcagacgtaaaccagtggaatcgacttacgcaggccgcccatcttaaagatgttctgctcgtgatggcaggcaaggataaccgagccggaggacaggaacagcaaggctttgaagaacgcgtgcgtcatcaggtggaagatagccgcatcccacgcctgaacacccagcgccaggaacatatagccaatctggctcatggtcgagtaagcgaggacgcgtttgatgtcggtctgcaccaaggccgcaaaaccagccagcaccagcgttaccgcccccacaatccccaccagatgcaggatgtcaggtgccatcaggaataggccgtgcgtacgggcaatcagatagacacccgccgtcaccatcgttgcagcgtggatcagggccgaaaccggagttggacccgccatcgcatcggcaagccaggtctgcaacggcagctgcgccgatttaccgaccgcgccgcccagcagcatcagggttgcccaggtgattgtcgtgtcgcccactgccagcttctgcggtgccaggatcatcagttcacgaatgttcagcgtacccagttcgcggtagaggatgaacagcgcgaaagccaggaacacgtcacccacgcgggtcacgataaaggctttcatcgccgccgcgccgttgtctggattggtgtagtagaacccaatcagcaggtaactgcacagccctaccccttcccagccgaggtacatcagcagcaagttgtcggccaacaccagaatcaccatgctggcgataaacaggttggtataagcgaagaagcgtgagtaaccctcttcaccgcgcatataccaagaggcaaacatgtggatgaagaaaccgacgccggttaccacggacagcatggtcatcgacagcccgtcgagggtcagcgtggcggagatgttgaaatcgccgacttgcatccaggtccacaggttctggttaaataccggaacacccgcagcacgctggctcaggaagttaatgccaacataaagggtcaccagcgcggcgagaccaattgagcctacaccgacagtagccgacgtattttcagaccaacgcccgcgagaaaaggccaacaacaggaagccaatcagcgggaacagaattgttaaatataataggttcatccgcgcatctcactgacagtgtcgatattcagggtatgtcgacgacgatagagttgcagcagtaaggccaaaccaatactggcttccgctgccgcgaggctgatggccaggatatacatcacctgtccgtctgcctgtccccaatagctgccggctacgataaaggccagcgccgccgcgttgatcatcacttcaaggctaatcaacataaacagcaggttacgtcgtaccaataatccggtcagtcccaacacgaacaggatagcggccaggatcaggccatgctgtagagggatcatgctctctcctccgtttttctttttgccatctctttgaccggcgcagcggatgcgttgccgagcacttcacccggcttgtgttcacgtccgatgtggaaggccactaccagaccggcgagcaacagcattgatgccagctcgaccgccagtacgtaaggaccgaacagcgcgataccgaccgctttcgcgtcaaccatcgtgcccttgatcccctggtcatgcagaccggtgatggaagcaatcatcaccgccagcagcacgacggccagaatcgacggcccaatccaggtcgagggtttcagccaggcgcgctcctgttcctgcacgttgccgaggttcaacatcatcaccacgaacacgaacagcaccataatggcaccggcgtagacgatgatttccagcgcggcagcgaagtatgcgccgagcgagaagaacacggcggcaattgccagcagcgagatgatcaggtacagcagtgcgtgtaccgggttggtgtgcgtgatagtgcgcaacgtcgccaacacggccaccagggctgcaatataaaatgcaaattccatgcttgcggctccttagggcatcagacctttgacgttgatcggcttggcttcgttttcggcttcacctttcgctttgccgtcaacggccataccggccatccggtaaaagttatattccggatacttaccgggtcctgaaatcaacagatcttctttttcatacaccagatcctggcgtttgaattcacccaactcgaagtctggcgtcagctgaatcgccgtcgtcggacatgcctcttcgcacaggccgcagaagatgcagcgcgagaagttgatgcggaagaactccggataccaacgaccgtctttcatctctgctttttgcagcgaaatacagcctacagggcaggctaccgcgcaaaggttacaggcaacgcaacgctcctgaccgtcagggtcacgcgtcaacacaatacgaccacggtagcgcggcggcagatatacaggttcttccgggtacatcaaggtttcacgtttggcgaaggcatggagacctatcagccacagactgcgaacctgggtgccgaaaccaaccactagctctttcaatgtcatggttcaatcaccccttattaatttgcgtggtacaaaatgaccgcagcggttgccaacagattcagcaaggtcagcggcaggcatatacgccagccaaatgacatcacctgatcgtaacgaggacgcggcaacgcggcgcggagcaagatgaacatcaccatgaagaacgcagtcttcaacgcaaaccagataaacggcggcaggaacggtccctgccagcccccgaagaacagcgtcacaatcagcgcagaaacagtgacgataccgatgtactcgcccacgaagaacagaccgaacttcatgccggaatattcgatgtgataaccgtcggccagttcctgttcggcttctggctggtcaaacgggtgacggtgacaaacggctacgcccgctatcgcgaaggtcaggaacccaaagaactgcgggatgatgttccacaggtgttcctgggaatgcacgatgtcctgcaggttaaaggatcccgcctgcgccacgacgcccatcagcgacaggccgaggaacacttcatagctcagcgtttgggccgaggcgcgcattgcaccgagcagcgagtatttgttgttactggaccagccagcaaacagcacggcgtaaaccgtcagacccgccatcatcaggaagaacaggatgccgatattcaggttggcgccataccaggtcggtgccaccggcacaatcgcgaaggccatcagcatggagctgaaggcaatcatcggtgccagcgtaaagatggcgcggtccgagaatttcggcgcccagtcttctttaaagaacatcttgatcatgtcagcagccagctgcaacgagccgccccagccgacacggttaggtccgtatcgattttggaacaggcccagcagacggcgttctgcgaagctcataaatgccccgacggtaaccacaaccaacaggatgaccaccgctttaaccacagcgataatcgtgtcgataacttcaggtgtaaaccaactcatcgggttgcctcccgcagattctcaaccgttgcgccaaccagcaccggaggaattcccggtaagcccagcggcagaccaacttgtcctttatcgagggtatcactcagacgaaccggcagcgtcagggtttgtccagcacaggtaaactcgacctgcgtgccctgattaacgccgagtgctgcggcatcggacgggttaaccatcacgtaaggctctggcatacgctgctggataacgctcgaacgctgagacatctcttcactaccgaacaggtggtagtaaggggcaacgcgccagtggttttcctcggcggtaaacgcagcaggaatgttgccgaagtagtcgaggctgccctctcccgcttcgataagacgcacacctgggtcaccgtgacgcagtttgccaccgacttcggcctggaatttgttccacgcctgcggggagttccagcccggagcccaagcaaacggcacctgttgacgattggcatacgggctgttgttcccttccatcgagaaggcaaacatggtgtctttgtcctgcggctgacgcggttcatgcacgctgatgttggcacgcatggcggtacgtccgctcgaacggataggagaacgcgccagcttctgaccgcggatacggaaagtcgcatccggtgcggcctcgacgatacctttcagctgaggcagcacggcgacgcaggcttcgataacgtgatcgagctgagtccagtcaacgcgacggctgttaatggtagagtgcagcgaatgcagccagcgccagctttcaaacatcgccaccgtcgtatcgtagtaggccgggtcgtaaacctggaagtagcgctgggcgcggccttcctgattgaccagcgtaccgtcactctcggcaaagctcgccgcaggcaggataaggctagccttgtccatgatgcgggtgcgctgatggtcaacgaccagcaggtttttcactttggacagtgcagcatcgacgctggcttccggtgcctgacgatagaggtcgttttccatcacgataacgctatcggcgtcgccgttggtcagcaggctcagggcctcatcaaggttgccgccgccaatcatcgacagaccgatgctgttggcagaagacgccacaaaggtgataccgacgtcgctgccgcgcgctttcagggctttcgccacgttggcggccgcttcgatgatggcatcgctgcccgcgttggtcccggtgataatcagcggttttctcgcgccggttaacgcctgcacaatcatgtcaactttcttgccaacgccttcagcaaggtcagaaacacccggtgcggcctcgtcaatagcgtgggctatcgcaaaaccgaaacgcgcctgttcatcgaccggcgcacggtagttcagcgcggcgatgtcatcaagacgggtgttatcgacgttggtcatgaacaaggggtatttggcatgctggccgatggtctggattgccgcaatctgccagtcagcaacgcgctgcgctgcggccatggcacgggctttccccttcaccgcctgacgcacggacagcgcaatgcgcgcgccggtctgcgtcaaatcttcacccagaatcagcacggcgtcataatcttcgatttcacgcaatgcaggcgtatacacgccgctgtttttcaggatgttcagtatctgtgccagacgattttgctcagcggcgttgataccggtgtagaagttctctgctcccaccagctcgcgtagcgcaaagttgctttcgaggctggcacgcggtgaaccaataccgatagttttgcttgattgacgcagaatatccgccgcgccctgcattgcctgctcggcgttcagggagatccagtcgttgccgcgctgctgcagtggatgcttaggacgatctttagcgttcacgtagccgtaaccaaagcggccacggtcgcaaaggaagtagcggttcacggtaccgttgtagcggttttcgatacgacgaagttcgccgtagcgctcacccggctggtgttacagcccacgctgcactgctggcaaacgctaggggcaaactgcatgtcccatttacggttgtagcgctcggagtgcgttttgtcggtgaatacgcccgtcgggcagacctcgaccaggttgccggagaattcgctttccagcggaccgtcttccggacgaccaaagtagacgttgtcgtgcgcgccatacaccccgagatcggtaccgtccgcgtagtccttgtagtaacggacacagcgataacaggcgatgcagcggttcatctcgtgagaaatgaacggaccgagatcctgattctggtgggtacgtttggtgaaacgatagcgacgcgtggcgtggccggtcatgactgtcatgtcctgcaggtgacagttaccgccctcttcgcacaccggacagtcgtgtgggtggttggtcatcaaccattccactacgctctcacggaactgtttggcttctccgtcatcgatggaaataaaggttccatctgacgcaggcgtcatacatgacataaccaaacggccgcgcgtatcttccgcgttttggtattgcttaaccgcacattggcggcaagcgccgacgcttcccagcgccggatgccagcaaaaataaggaatatcgaggccaagagagaggcaagcctgaagtaggttgtccgctccatttacatcgtattctttgccgtctacatgaatcgtagccatagtcagcatgcttccacaaggctcacctttcagtgagcgttaatcaaaaattctggccggaactgcccgatttctcaggcataaattttcaagtcgttaccatcgctctttgagcaggttatttggctgtatgccgccaattgccgcgcattgttgtagtgttgcttggcgatgcccgcttcaaactcgtcccggaaatatttaatcgcactctgcaatggctccacggcacccggcgcatgtgcgcagaatgttttacccgggccaagctgacggcaaagttgctcgagggtttcgatgtccccgggctgcccttcgccgcgctccagtgcgcgcaggatcttgacgctccacggcagcccgtcacggcaaggcgtacaccagccgcaggactcgcgcgagaagaactcttcaaggttgcgcaccagagaaaccatgccgatttcatgatcgacggccatcgccaacgcggtgcccaaacggctaccggccttgccgatgctggcaaattccatcggcaggtcgagatgctggtcggtcaggaagtcggtccctgccccgcccggctgccaggccttaaatttcagcccgtcgcgcataccgcccgcgtagtcttcgagaatttcgcgtgccgtggtgccaaacggcagttcccacacgcccggattcttcacgcggccggagaagcccatcatcttggtgccggtgtcttcgctggtcgaaatgcctttgtaccagtcgacgccgttggccaagatagccggaacgttcgacagggtttcaacgttattaacgcaggtcggcttgccccatgccccgacagacgccgggaacggcggcttggagcgcgggttggcgcggcggccttccagcgagttaatcagcgcggtttcttcgccacagatatagcggcccgcgccagtgtgcaccatcagctcgaaatcgaacccggtgccgagaatgtttttgccaataaatccggcagcacgcgcttcttcaatcgcgcgacgcaggttaacggcggcctcgatatactcaccgcgcaggaagatgtagccacggtaggccttcagcgcaaaggcgctgatcaacataccttcaaccagctgatgcggcatttgctccatcaacaggcggtctttataggtacccggctccatttcatcagcgttacacagcaggtaacggatgttcatggattcgtctttcggcatcaggctccacttcagaccggtagagaagcccgcgccgccacgccccttcagaccagagtctttgaccagcgcgactatctcgtcaggcgacatgccgccgagcgctttctctgcaccggcgtaaccgtttttgctgcggtattcgtcaatccacaccggctgctggtcttcgcgcatgcgccaggtcagcggatgcatctccggggtacggatgatttctttaggcgtgtaaccgtaaatattcatgagtaacgctccagtaactgaccaatttcttctggtttcaggtagctgtgcgtgtcttcatcgatcatcatcgttgggctcttatcacagttgcccaggcagcaggttggcagcagggtaaaacgtccgtccggcgtggtttcacccggtttgatattgagcttttcttcgatagcagcctgaataccctgatagccggtgatatgacacaccacgctgtcgcaatagcggatcacgtggcggcccacaggctggcggaagatctggctgtaaaacgtcgcaacaccctctacgtcgctggcagggatccccagcacgtcggcgatggcgtagattgcaccgtctggcacccaaccgcgctctttctgcacgattttcagcgcttcaatcgagacagcacgcgcatcttcgtagtgatgtttctcgtgttcaatcgcgtcacgttcagtcgcgctcagctcaaacgtctgcttgttcgcctgagcagcaaaagccgcaggcgtagagacgttgatgtactgaacctctgagtcttttttaagatctgtcatcgttagcggtccacatctgacattacaaaatcaatactgcccaggtagacgatcaggtccgaaaccaggctgccacggataaccgacgggatctgctgcaagtgcgggaagctcggcgtacgcacgcgggtgcggtagctcatggtgctgccatcgctcgtcaggtagtagctgttgatccctttcgttgcctcgatcatctggaaggattcgttggcaggcataaccggccccacgaaacctgcaggaagtgggttatcagggtttcgatgtgctgtagcgtgcgctctttcggcggtggcgtcgtcagtgggtgatcggccttgaacgggccagccggcatgttgtcgacgcactgttgcagaatacgcaggctctgacgcatctcttccattttcagcataacgcgggaataagagtcgctgatgccgtcaccgaccggaacttcgaagtcaaagttttcatagccggagtacggacgccatttgcgcacgtcaaattcgatgccggttgctcgcaggcccgcaccggtggtaccccaagccaacgcatcttctgcgttgtaggcagcaatacctttggaacgaccaatcaggatgctgtttttcagcgccgtcttcatgtaggaatcgaggcgttttggcatccactcgaggaactcacgcatcaggcgttcccaacctttcggcaggtcgtgcgccacgccaccgatgcggaaccacgccgggtgcatacggaaaccggtaatcgcctcgacgacgtcatagattttctgacggtcagtgaaggcgaagaacaccggcgtcattgcgccaacgtcctgaatgaacgtagagatataaagcaggtggctgttaatgcggaacagctcggagagcatcacgcgaatagtgttaacgcgatcgccgacggtgattccggccagtttttcaaccgccagcacgtaaggcatttcgttaacgcagccgccgaggtactcgatgcggtcggtgtaagggatgtagctgtgccaggactggcgctcacccattttctctgcaccgcggtggtgataaccgatgtccggaacgcagtcgacaatctcttccccgtcgagctgcatcacaatgcggaacgcaccgtgggcagacgggtggttaggaccgaggttcaggaacataaagtcttcgttttcggtgccgcgcttcatgccccagtcttcaggcttgaaggtcagcgactccatctcgaggtcttctttctgcttggtcagctcgaacgggtcaaactcggtcgcgcgcgcaggatagtctttgcgcagcggatgcccttcccaggtcttcggcatcatgatgcgcgtcagatgtgggtggccgtcgaaggtgataccgaacatttcccaggtttcacgctcataccagttggcatttgggtaaactttggtcagcgtaggcaggtgcaaatcgttttcagctagcgcgaccttgagcatgatgtcgctgttgcgttcgattgaaagcagatgatagaaaacggagaaatccgcggccggtaaaccgtcgcggtggttacgcaaacgctcatccacgccatgcaagtcatacagcatgacgtaaggcttcggctgtttgcgtaaaaaggtaatgacttccagtatctgctcgcgttttacccacaccaccgggataccggtacgggtcggctgaacagaaaaggcctcaggcccaaaacggttacgcagctcgccgataaccggatcatcgagatgatcgcgggtttgccatgctggctgtgcgaggtcttgcgtcgtcaaatctgtcatattttctcaccacactaaatggtcatttatgcccaaggggaaaagcgttttagtgcaccgtcgtctctaataatcttgtcctgacggccttgcccctcagggttgacgaacagtgttaaatctcgtcaggggtgcgcaaattcgtcacggcaatacgctcggcgcgtttacgctctttttcagactgcatattggcgcgataaacaccctgatcaccgaccacccatgacagtgggcgacgctctttgccgatcgactcctgcagcagcagcagtgcctgcatataggcctcggggcgcggcgggcagcccggaatgtaaacgtctacaggcaggaacttgtcaacgccctgcaccacggagtagatgtcatacatgccgccggagttggcgcaggcacccatcgagataacccatttaggttcgagcatctggtcgtacaggcgctgaataaccggcgccattttggtaaagcaggtaccggcaaccaccataaagtcagcctgacgcggtgaagcacggataacttccgagccaaatcgcgccacgtcatgcacggcggtaaatgacgttgtcatttctacgtagcagcatgagagaccaaagttgaatggccaaagcgagtttttacgaccccagttcaccacgtcatgtaaagcgtgttcgagtttccccatatacacgctgcggttcacttcctgctcaagagggtcggcaaccgtctcttgtttttgcagggggtaacggtcgttctcaccgtttgggtctaagcgggtgagcgtatagtccatcttgatgcctcacttttttattggcgattgccttgcgggtgattgctggtcttaatgactgggctcgggataaccgggctagctttcacaggacctttcgaacgagtcggggtccagtcaagcgcgccgatgcgaaccagataaaacaggccggctaaaaggataaaaatgaaaatcgcggcttcgacaaagccggtccacccactctcgcgaatcgacgtagaccatgcatagagatacagggcttccacatcgaaaataacgaagaacatggcgaccagatagaattttgccgagagacgcatatgagtcgtacccacgggggcgatacccgactcgaagggcgtttccgtgttgcgtccgcgaaccttccctcccaggaaagctgcgcctaacaacatcaggcaacacaggccgactgcgattattagaaaaactgcgagcgcccagttatgagcggtgacatctgtggctgttgacatactctatgcttactcatcaaaagtggcgtgatgcatttgctcttgcccggcaacttgcctgccacatcgattcaagggaaggattaagaaccaccagcgttcacgggttccctgctgaccgatatcaccccaaactggcggtaatctcatagactcaggggtttaaaagcgattatccagtgaattactgtgggctttttacccttttctataaccttttgtcaactttgacaaaagtatctctacgttattttacatctttagcattttattaacataacatgcgaacttcgacagctaaatcgagtcagtcaaaaagttaaaaaaaaaggatggtggttaacgagagtcaatgctttagcgcctacccctactattgtcgcaggtatgccccattcttccactctggaaacagggttatttattgatccaggacacgttttaggcaagattgctaaaaaataagacaattattgaatgaattttgtttaatcatttaaaataaaaatgcatttcatcaaaaaatcttagtatcacgacggaggatttgggccccaaaaagtccatgatttgtgtgaggtgatagttgcgtaatgagacaatttaagggaatgattaagcggggttaagtcggggaaatagcaggttggtaaagaaaaactaatgagttggttatttattggtctttgtagttttcctgtccccggccctgaagcgttaacaggagggcggggaaaaggaaaaaaacattcagaacgagtctacggcgcttcttcgtattcgtcgtcaacgttggcgcgctgggcgtaactattgagcgaataaggatcgttgccttgttcaacagcgttgaaaatagccagcgcaagatcgttgtcacaatgctggttcttgtacaacacgtattgcgtgtccggcagtctcggcaggccgtcctgctcacccagaactctgagctcggggctcatcatctcaataggccgcaccgtaacgcccagacccgctcgcaccgcagcacggatggctgaaagcgtagaggccacgtaggcaatacgccacgggatcccggccttgttgaggtgctcaatcgccatagagcgataagggctaggttcatcaagcagcactaacggcacgctgtcgcccgacggatacgagaagtcggcagagcaataccacagcgtgggtgacgttctcagcacgatatgtggatgatcggtggtggtcatggtggtgatcgccagatcaacttcgtcactttcaagcatcggtaacataaacgggctacgcttaacccgcacgtcaattgacagcttcggatagatagaggtcactcggctcaacagataaggcagaatggtatctgcggtatcgtctgaagctccgatggtcactccaccctgaacgtcgctatacattaatgaagtgcaggcttcgtcgttaaaacgtaatatttttcttgcgtagccaagtaactgaataccgtgttccgtcaataacttattgcgtccatgcctggcgaacagttctttaccgacaagttgctctagacgttgcatttgctgactgacagccgactgggtacgacaaactgcggcggcggcggcggcgaaagtatttaaatcagcgactgcaacaaaggtcctaagcaggtctagatctagattaagaattggacgatttgcatttgtcatagtttttcttcacttttaaaatctaataacaagctaccctggatagtgcggaaaaagagcccgcataatgcagaataccagatctgaaagacactcactcattagataatgaagaaatgagaaatatttctgcctgacaactcacaataaaatgatcaggattaccgtgctttttcaaatagtgattaaattcaaagaaatataatttcccatctggaaagcttgataattagaatcattaacctagctgtacaataaggctactaaggctcatttcaacggctgccgaggcaggtacggcgcagcgctagcaattcgatatataaataatttctcaaaggtaaacgactgaaatctatttatttggtctacatgcggcaaattgcttttgccgatgtgttatatcgacgctgcctaataggactattcctaatcgagtttagtggggctaatcagcttctcgacagaatattcatttatttaattcatactacgcagactaatcatcagaattatttaactaattacttacgttattatatcgtaaacatggctacgcgtttacctttctgataactgttcaagtttcatttatacactaatgaaaaacagaaaaaccgcgatggctcgcagtttaagataaagccatagcggcctaatattgctagcattgttctaattttcaagaagatggaatttatgtggaagtatctttttgaataaattgaattatcagctgtacacagtcgaatacactgtcaacctgctattacctgccctttccagataatcacaccacagtaagcgcaatgggaagaacttaatatcatacataaggttattttaggtgatagatgtcataacccgcgcagtgcctgttgttttacgccaaagcccgcattagcccttcaaaatccgcctctggaagagtaaattgacggcttcgctatgttctacggcacctcatccagggaagaacaggctttaccgcaaaaggttcacactgactatgtccccattgaaaaatcccgcaaactggataacgtttgctacgacattcgcggcccagtgcttaaagaagcaaagcgtctggaagaagaaggcaataaagtcctcaagctgaatatcggtaaccccgctccctttggtttcgaagcgcctgatgaaattttagtcgacgtcattcgtaatttgccgacggctcagggatattgtgactctaagggtcttttctctgcgcgtaaggccatcatgcagcactaccaggcgcgtgatatgcgcgacattaccgttgaagatgtttacatcggtaacggcgtgtcggagcttatcgtccagtcgatgcaggcgctgttgaacaccggcgacgagatgttggtgccagccccagattatcctctgtggaccgctgcggtttccctgtccggcggcaacgcggtgcattatctttgcgatgaagggcggactggttccctgacctcgaggacattcgagccaaaatcacgccgcgcacgcgcggtatcgtgataatcaacccgaacaacccgaccggcgcggtctacagcaaagagctgctgatggagattgtcgagattgcgcgcgagcacaacctgatcatcttctctgacgagatctacgacaagattctttatgatgaagcgcagcatatctcgatagcctcgctggcacctgacttgctgactgtgacctttaacggcctgtcaaagacttaccgcgttgccggtttccgtcagggttggatggtgcttaacggcccgaaaaaacacgctaaaggctatatcgaaggcctggaaatgctggcctcaatgcgtctgtgcgccaacgtaccaatgcagcatgcgattcagactgcgcttggcggttatcagagcatcagcgagttcattcagccgggcggccgcctggttgagcaacgcaacgccgcctgggaaatgatcaaccagatccctggtgtgtcctgcgtgaagccgaaaggcgcgctctacatgttcccaaaaattgacgccaagcgcttcaatattcacgacgatcagaagctggtgctggatctgttactgcaacaaaaagtgttgctggtgcagggttcagcgttcaattggccctacccggatcacgtgcgaattgtcacactgccgcgcgtagacgagctggaaatggccgtcgggaagctaggacgtttcctggaaacctatcgccaataatgcccatcacctttcaaggtgcagaagcacgacgccctgcaccttgaaatcttttgggcatctgaattatgtgtaagaatggggctctgtttactgatgtaagagagtcctatgagtcaaagtcacttttttgcccatctttcgcgccttaaactcattggtcgctggcctctcatgcgcaacgtgcgcacggaaaacgtgtcggaacacagcctgcaggttgcctttgtggcccacgcgttggcgctcatcaaaaatcgtaaattcgacggtaacctcaacgcagagcgagtggcgttattggccatgtatcacgacgcaagtgaagtgctgacgggtgatatgccgacgcccatcaaatactacaatccacaaatagcacacgaatacaaaaagatagaaaaaatagcccagcagaaactcatcgagatgctgccggaagagtttcaagacgactaccgaacgcttatcgacgaacatcactttagtgaagaagagaagaagacggtcaaacaggctgacgcactttgcgcctatctgaaatgcctggaggaactctcggcgggcaataccgagttctcgatggcgaaagccaggctagagaaaacgttgtcggagaggcagagtcccgagatggactactttatggcggtcttcatcccgagcttcagtctgtcgcttgacgagataagccaggattccccgctttaagaaacgcccttttgctcccgagaaattggggagcgatacttacatcgtttcaggcattaataatgcgcgcaatctctaccgcactgagatgatactgacgtgggcaaccgtgccagaccgccaacatgcgctgatacttctcccacattttggtctgtgcattgaaaccatgcgttcccgcatcgaaatcagtgtagcgcccttcactgtttaccataaagcgcacatagctgaggtagcgggattcagtagcggcatcaaagccaagaaactccagccgacggggatcgacacccggtgcgtcttcaagattcgaaaaagatacctgcatcgcgtggtgcatttccatgatatcgatgagggtgcggcaagtgtcctcggtcaacgcaccaaagtctttgtcgagctcgcgcatttgcagcccgaagccacgttcaacgatggtttgcaaacggcggtagcggtccgcgtttgcgggatccatgatagtcatcatttgatactgattcgacaagatcaaccgctgagcgtgagtcatttccatcatcgtatacctcaaaaagccagaatgagcaaagcatgacacagcgccgtcattggcgaaatatcaaccagctcattctttgatttgaaccacgattcagaacgaattctttctttaaatgtcgtccaggaaggttttatccagctgtttaaacgcgcgcttgagcacctcggcgagggactgataggtgggtacgccctcgatcggtgctaatgcctggccggcttcaatcagcttgtggcgaacttcgtggaaccagccgagcagcgtaggcggcagaggagttacagagcgacgtcccaaccaccagagtccctgcataggcaggctacaggcgaagatagaggtggcgaccgcaggaccaagctgtccgcctaacgcaatttgccaggccagcgtaaacaccgccagaggcggcatgaaacgcacaccgaaacgtgtggccgtagagattcggttttccggaaacacaggagcaaggcgtttgtctgagggccacgtcttcatgtagtgctgaccgcgctggaaaatgtgaaaccaaccgactgaacccgatggcttactagacatgctgcacctcaacatcttggaatttaaaaaatagttgcaaaactaaaaatatattttatcacatacaaatatattttgtttttatcaaaacctatcggtatcctagcccagccctttggggctcactatggatagcgaattaaccctattattacagcttgtacaactagctttaccgcattttactctgcgccgcttcgctagggaaacagacacgggcaattgaacgaataggcgagaacttactcaaacaagcgaacaagttcgtttaaaacaccccgtacggctgcttactgagcgttaaggaacaaatcatgccattaaactgtctgagcatgatgttaatcataaatcccgacagcatagtgcgctacgcttagggaaatatgctattgagttaaccttgcgttttgatacttaacagcaccaatccaataaataggtacttccatgtcaagtaagttagttctggttcttaactgtggtagctcatcacttaagtttgccataatcgatgccgtcaacggcgaagaacacatttcaggtctggccgaatgcttccatcttccagaagcccgcatcaagtggaaactcgatggcagcaagcatgaagctgctttaggcgccggggccgcacatagtgaagccttgaagtacattgttaatactatttttgcagaaaagccagagttgtctgccaatctggtggccatcggtcaccgcattgtgcacggcggcgagaaactgacgcagtctgccgtgattgatgctgtggtattgcagggtatcaaagattctatcccatttgcaccgctgcataacccggctcacctgattggtattgatgaggcgttgaaatctttccctaaattggctgataaaaatgttgcggtattcgacaccgccttccaccagaccatgccggaagagtcttacctctacgccctgccgtacaagctctataaagaccaccacattcgtcgctacggcgcgcacggcaccagccattactatgtcactcaggaagcagcaaaaacgctgggcaaaccggttgatgaagttaacctcatcacctgccatctgggtaacggcggttctgtcagtgccattcgtaacggtaaatgcgttgatacctcaatgggcctgacgccgctcgaaggactggtcatgggcacgcgcagcggtgatatcgatcctgcgattgtcttccacctgcacgacgcgctgggcatgagcgtcgatcaaataaacaaaatgctgaccaaggaatccggcctgctgggcctgaccgaagttaccagcgactgccgctacgttgaagacaactacggaaccaaagaagatgccaaacgtgcgatggatgtcttctgccaccgtctggcgaaatacatcggcggctacacctcgctgatggaaggccgtcttgacgctatcgtcttcaccggcggtatcggcgaaaacgccgcgctggtgcgtgagctgacgctgaacaagctcggcctgctcggcttcgaaatcgaccacgagcgcaaccttgcagcgcgcttcggcaaagccggtgaaatcaataaagaaggcacccgcaaagcgttggttatcccaaccaacgaagagttggtcatcgcacaagacgctgcgcgtctgaccgcataaatatgttcccccactgccagcctctgctggcagtgttgttttcacagcaggcaggcttgcctttcactgcgcaagccgctgcctgaaatcgtcgaagaggtttgccgtgtctcgtacaattatgttggttccaattggcaatagcgtgggtctgaccagcgttagcctgggcgttatccgtgccatcgaacagaaaggcgtaagcctgagcgtgttcaagccggtctctcagccgcgttccggtggcgatgctcccgatcagaccaccaccattatccgcgccaattccaatatcacagcggccgaaccgctcaagatgaagcatgtacaaagcctgctgagctctaatcagcaggacgtgctgatggaggagattgtcgccaactaccacgccaataccaagaatgccgaagtggtactagttgaaggcctggtctcgacccgcacccatcagtttgccagcgcgctgaactacgaaatagccaagaccctgaacgctgaaatcgtcttcgttatcggtcagggcaatgacagcgcgtcccagctcaaggaccgcatcgagctggcccgcagcgtgtttggcggcagcaagaataaaaacatcactggcgttatcatcaacaaggtcaatgcaccggtcgacgatcagggccgcacccgccctgatctgtcagaaatctttgatgactccgacaaagccaacttcgcgcatgtagatatcgagcaactggtggcgatgagcccgatgcctgtgctgggcagcattccctggagctttgaaatgattgccgtgcgcgctatcgacatggcgaagcacctcgacgcacgcattatcaacgaaggcgatattcacacccgtcgcatcaagtccgtgaccttctgcgcgcgcagcattccgaacatgctttccctgttccgcccaggctcactgctggtgacctccgccgaccgtcctgacgtgctggttgccgcctgtctggccgccatgaacggcattgagctcggcgcgattctgcttaccggcggttatccggtggatgaacgcattcagcaactctgcgcccgtgctttcgagaccggcctgccggtattcatggttgacagcaacacctggcagacctcgctgaacctgcaaagcttcagcctcgaagtcccggccgatgaccaccagcgcgttgagaagctgcaaacctttgtgtcttcacatattaacgcagactggatcaactcactgagcgcccattcagagcgttcacaccgcctgtcgccgcctgcattccgctatcagctgaccgagctggcgcgtaaagccggtaagcgcatcgtgctgccagaaggcgacgagccgcgcaccgtcaaagcggcttcgctgtgtgcagagcgtggtatcgccgaatgtgtgctgctgggtaatcctgacgaaatcaaacgcgtcgccgccgcgcagggcatagaattaggtgccggcatccaaatcgtagatccgcttcaggttcgcgaagagtacgttgcccgcctcgtcgagctgcgcaagagcaaaggcatgaccgaagtcgtggcccgtgaacagttggaagacaacgtggtgctgggtacgctgatgttggaaaaaggcgaagtagacggactggtttccggcgcggttcacaccaccgctaacaccattcgtccgccgttacagcttatcaaaaccgcaccgggcagctcgttggtgtcttccgtattcttcatgctgctgccggaccaggtactggtttatggcgactgtgcgatcaacccggatccgaccgccgaacagctttccgaaatcgccattcagtctgccgattcagctgccgccttcggaatcgaaccccgcgttgcgatgatctcttactccaccggtaactccggtgccggtagcgacgttgagaaagtgcgcgaagcgacccgtctggcgcaggagaaacgtccggacctgatcatcgacggccccttgcagtatgacgcggctatcatggccgacgtggcgaaatccaaagcaccaaactcaccggtggcgggtcaggcaaccgtgttcatcttcccagacctcaacaccggcaatacgacctacaaagcggtacaacgttctgcggacctggtttctatcggcccgatgctgcaaggcatgcgcaagccggttaacgatctgtctcgcggtgcgttggttgacgacatcgtctataccgtggctctgaccgcaatccagtccgctcaggctgatgaagcggttgcggtaaaataaacaataaacgccaaccttaagaccggtcaatgaccggccttttttatgtcttaatgaaagaagttaagtacgtggccataaatcagcccaacgctgatgatgtcggcgtcgctaaaggtaacgttctgcaaaccatagctgcccagcaacggcagtaaaagtgcaggcagtagggttatcagcaggccgtgaaatacgccgccgatgacggcccctcgccttccgcctaccgcgttggcaaaaatacccgccgtgccaccggcaaagaagttggtcaacatgcctggcaggatcatcgccagccccacgttcggaaataaaaacatgccgataatcgagccgacggtggtactgataaaaccgataatcaccgcattgggcgcatacgggaacagcaccgggcagtccagtgcgggaatggcattaggcacgatgcgcagtgcaataccgcgaaaggccgggatgatttcggccagcagcaggcgtacgcccgcgagcagcacatagacccccacgacaaactgcaccgactgcaaaaacgcgaataccagataactgacgcccttagaatactgcgccaccacctcaggacccgcagcaatcgtcgggatgaggtaaatggggatcatcaccaccatcatcgataaataggtatcttgcaggaaggagaaggcgctcggcagctcaatatcttcggtacttttactgacgtcgccggtcagcttcgccacgccggcctgcaccagataccccagcgtgcagaaatggcccagcgcgatatcgtctgagccggttatctttcgcacgataggctgtgccagcgcaggcatgcctaccgccatcaacccagcgatgccgccaccgacaagaataagctcggtgccgcgcagtccgcccatgtagccgacaaccgagcagaccgtcgccatccacagcgacgcctggccggttagaaaaatgtacttaacgcgggtgaagcgggcgacaagaatattgatgataaatgccagcaccatgataagcgcggtttctcgacccaaagtctgctgagcgataccggcaatcgaccccacgtcggtcacgacgccacgcatgttgaaacctttctggaaaacttcacccagaaagttcagcgctccaacgataatgttggctccggcgagcagcaccagaaagccaagcagcgtttttaacgtgccggtgataatctgaccgacgttttttttcagcgcaataagccccaccatagcgataagggcaatgagtatcgaggcctggcctaaaacgtcattcacaataaaatataaaaaagacatccccttccctcgcgattaaaggcaattataaactctctcatttttattttcggcgagacttaatttaaatatcccctctcttttaataccggcgttaacttctcggttatttccttcttatcaatcaggcgccttaaatagataacggttgaactaagcgtgtagttctcgaattgagatttaaaattggatccggtcataataatatcggcacgcgtagaggctgcgcttgaaatatcacagtgagacaacgccgccttaatgcccatatccttcaacgccgcctcaatactcatctcacaggcgaaactgctgccgaggcccgcaccgcatactgctaatatcgttaaagatttcatggcttaccctcgcatcttatgccttacccaagattagatgtcgtttgctaatcatcataaaaatttattactgctattttttttctgcccgctgccttattttaagacagcgtttacaggcccgagacggaggggcgcagggcgtgaaagagtcatcattacctaaatttaataatattcagtatgctttcaaattcgcaaataactgtgatgcaaaccacaaagatagcgctatcattttaggcgatcgttttttgtgatagcgctatcaaaaaagcctgcccgccttagcttattttcatccagagtggctatgatagaattgtaaattaatcattctgcgcagaggattaattcagtctcgtcggccattgttcggatgttcatgaagaaaagtcaggagtgaaaatggagccgagaaaacgccgcagtaccggacgggccacgctggccgatgtcgcgaaacgggctagcgtcgggacaatgaccgtttcacgcgcgctacgacagccggatagggtctccgacaagctcagggagaagattttctctgcggtagccgagctgggttacatccctaattattcggccagtgcgctcgcatcggcgtcttcgaacgttgtggcggtcgtcacctcgtcgctgacggaatatgggcatgccgagatgattgccggcgtgcaggaagtgctgattccggcgggctatcagctgatgctggccgagtcgcagaatcaggaagaacgcgaacagaaactgcttgaaaccttcatgtcctataatttggcggcggtcattttgtttgacgcgcggcacaccgacagcacctacgagctgctttcacacgcacaactgccggtcgcagaattgggcgccaccgtggataatcctttggatatcaacatcggtatcgacaacgcctcggcggtttacagactaaccgaacatcttatttctctggggtacagcaaaattggcctgatgtgcgcggcgcaaaagcagtgggtgtcgcaacaacgtttgcgcggctggcatcgcgccatgctagacaataatctatcaactacgcgggtcatcagcacacatgcaccgtcgaactttagtacgggtgctaacctgctgccggagctagtgctgaactggccagatatggacgctctaatctgcagcagcgacgagctggcctgtggcgcgatatttgagtgtcagcgccgcaagattcgggtgcctaaagatctggccattgtgggatttggcgatagcgacgttggcaaagtatgccagccaccgctgacaacggtcgccgtaccgcatcgcgagattggcgttcaggcgggatagcgctgcttgagcggcttcagggagaggaggcgtcggcgcaaaagccaattgtttccgcactgtgtaagcgggaaagttgctaatgcagacacgctaaatcgtggtcagcgtgtctgcaagggaagcgcgaaattactcttcgacgctcagcggtttgccgtgatctttttcgttgttacggctcatccacagcgagagtgctttcagcgaatcaggggtgaactcatcgcagcgtgcggtgatttcttcgggtttcatccagcgcacttcatcgacttcttcttcctgtagcgcaaaggggccgtgggaaacgcagctaaacaacgatccccacacccggcagttgtcttgttcgaaataaaacgcaccatgttcagcaaaaggtacaccggcaatgcccaactcttcttctgcttcgcgacgggcggaatcgaggatattttccccgctctgcaccacgccgcccgctgtcgcatcaagccaaccaggatagaaatcttttgtttcggttcgacgctgaatcaaaatatttcccatgccatcatgaaccacgatgtagctggcgcgatgacgtaagttttgagcgcgcatctgatggcggctggactgggcaatcacctcgttttcttcattaacgatatcaacccactcgtcgctgctgccggtgttttgctcttggttcgtcatcctatgaaaccttctctattgcgcggaatgttgcgctgtgatttttcaatgagtcactgattctatccggctcatggggatcgcttcaatagcaacagatgcgttagtaatatgtaaaacctatgtcaaaggccacggtaatccatcagactagtctgacataggctgctatcattagcagttatattaaccttatgggtattcttcaacactgtcacactcaattgagttaagcgttcgcatccagccccatcggtattgacccataaagcactgatggaccattaaaaaaatacgcaggaggcaattatgatcgacctttattatgcaccaacaccaaacggccataaaataaccctatttctggaggagtcgggacttccctatcgacttcatcgcgttgatatcaaatccggtgaccagtttctccctgcctttctcgcaatatcccccaacaacaaaatccccgctattgtagacagccaaccggtagacggcggcgtgcctctgagcctgtttgagtcgggtgccattttgcaatatctggccgagaagaccggcaagctgctgagtaaggagctgcgcgagcgcaccaacactctacaatggttgtactggcaggtcgcaggctttggcccgatgctgggacaaaacagccattttacgcatttcgctccccagccggtgccttacgccatcgagcgttatcagcaagagacaaagcgcctctacggcgtgctgaatacccagctggagaaacacgcgtatctctcgggcgaacattacagcattgccgatattgccacctatccttgggcgttgattcatgagcgccaacgcattgatctggctgactatccggcagttcgcaactgggtagaacgcattaaaaaccgcccggctaccgttaaagcctactctctggccgacgccagctaaggctttgtgcccccggttccgggggcgttttgttctgcctatcccgccccctttcctgataaataacgcgttctgtagataattaactacaggatgtgctctgtatcgcgtgttacctagctgacataaactatgctgactagcagagcacagatagtaatatcagcaagttaattggaggcagactatgaagattttgataaccggtgccagcgggctgattgggcgtcgtttgaccgagactctcctgagtcagtctcatcaagtcactgcattgacgcgcgcacctgagcgggcggccaaacttctcggccctcaggtgcagctctggaatacgctggcggacaagacatcgctggacggttttgacgcggtcatcaatttggccggtgaacctattgccgacaagcgctggaccaaagatcagaaacagaaactctgcgacagccgctggcagttgaccgaaaagcttgctgcgctgattaatgccagcacaaatccaccgtcggtatttatctcgggttctgcagttggctattatggcgatcagggtcaggcggtggtcgctgaggacgagccgccgaacaaacagttcacctggcagctttgcgcccgatgggaggcgctggcgctggcggcggaaagcgagagaactcgcgtctgcctgctgcgtaccggcgtggtgctctcccaaaagggcggcgcgctgtctaagatggtgttgcctttccgcgccggtctggggggcccttcggcgacggccagcagtatatgccgtggatacatatcgacgacatggttaacgccatcctcttcctgcttaatcatgaaaccttaaatggcgcattcaatctggtgtcaccttacccggtgcgcaacgatcaatttagcgcgctgctgggtgaaattctgcatcgcccgtcgtttatgcgcgttccggcgagcgtggtgcgactgctgatgggagaatctgcgattctggtgttgggcggccagcgggccatcccccaacggcttgaggatgccggatttgaatttcgttataccgagttgaaaccggccttagaggatgtgttagaaagataaaactttccgggttcttttgaagggagcggtcttttcgggcaaagacatgcgcttcgcttactgggccgtcgctcagtaagcgaagtttaaaagcggctcttatggcagccgccttgaaaaagtgcctgcgggctgctaagcccctatttcactgatgtttggtagaagatgtgcttcccaaacggatcaatttcgtagccggtcacttctttgcgcaccggttcaaagattttcgagtgggcaatcataattgccggcgcttcgtcgtgcatgatctgctgcgcctgttggtaaagcgccacacgcttgtcgtggtcggtggttaaacgcgcttgctcgataattttgtcaaacgccggatcgcaccatttcgccgagttagaaccgccgttggccgccttacaggtaaacaatggagcgaagaagttatccgggtcaccgttcgccgtcgtccagcccattagcgcggcctggtgctcgccattacggatgcgcgtctgatactcggcccattcatagctgacaatgtgcgccctgacgccaatcttcgcccagtctgactgaatcatctcggccatgcggcgcgcgttagggttgtaaggacgctgtaccggcatcgcccacagatcgatatcaaatccattcggatacccggcctccgccagcagcgccttggctttttccggcgagtacggatagtcctgcatcgtcttgtcttcactgctccatacgtccggcggcagcagactcttagcgactgtgccggtcccctggaatacggcatcgataatcgccgccttgtccaccgccatggtcagcgcctgacgcaccttgacgttatccagcggttttttctgcgtgttaaatgccaggaatccggtattcagacccgatttgctgagcaacgtaatatctttattgtcaccgagacgcttgaggtctgccggattcgggaaaggcattacctggcactcgttcttctcaagcttggccatacgcactgaagcatccggcgtgatgctgaaaatcaggcgatcaatcttggatttaccctgccaatactgtgggaaggccttgtagagaatgcgcgtgtctttctgatactgcaccagttcaaacggaccggtgccgaccgggtcggtatcgactttttgcggcgtgccggccttcagcatgttgtccgcgtattccgaggaaagaatcgaggcaaaataccagccgagatctgcgataaatggcgcttcgggacgcgacagattgaaacgcacggtgtaatcatcaacgcggtcaatgcttgaaatcagatggcccatatccagactgtcgaagttcagataggtgccgttagaaacgttgtgataagggttattaggatctttctggcgcatgaacgagaaaatcacgtcatcagcgttgaaatcccgcgttggggtaaacagtttattgctctggaacttcacccctttacgcaaatggaaggtgtaagtcttaccgtccgggctgatatcccagctttctgccaggcttgggatcagttcggtcgtcccggtcttgaaatccaccaaacggttgtagataggcaccgcgctggcgtcaacgttggttccagaagtataaagttgaggattgaaaatgtccggcgagccttcggagcaataaaccagcgtctgtgccgatgcccctgcgaccatcgccagggctaaaagtccggtggtcaattgtgctattttttgtttcatgcgtttccctgtcagaaagatatttggctaattaattcgttagtacgcaattcaaaaacagactaccattcacaataaacttagtaatactctgttatatatgaaaatcttatagataaacaaccagaggttaggatgtcgactcaaattgccaagcagctcactgaacgcttcttccgttacctgtccgttactagccaaagcgaccctaaagccaccgctctgccgagcacgccggggcagcaagagttagcaaaccttctcgccgaagagctaaaaacactggggctggagaatatcgagattgaccagcacgcgaccgtcaccgccgtgaaaccgggcaccaaaaaaggcggtccgcgcattggttttatcacccacattgacaccgttgacgtcggactgagcccggatattcacccgcagacgcaggtatttaacggcgacgatgtgtgcctgaatgccgaaaaaaatatctggctgcgtaccgatgagcatcctgaaattcttccgtacaaaggtgaggagatcatcttcagcgacggtaccagcgtgctcggcgcagacaacaagtcggcagtcaccgtggtgatgacgctgttggaaaacctgaccgaacaggagcaatacggcgatatcgtcgtggcgtttgtgccggatgaagagattggcctgcgcggcgccaaggcactggacctgcgccgttttgacgtcgatttcgcttacaccatcgactgctgcgaactcggcgaagtggtgtatgaaaacttcaacgccgcgtcggcggaaatcacctttaccggcgtgacggcgcatccgatgtcggccattggcgttctggtcaaccctctgctgatggcccacgatttcatcagccacttcgaccgcgaagaaacgccagaaaaaacgaaggatcgtgaaggctatgtttggttcaatgacatcagcgccaaccagcaagcggcgacgttgaaagcctcaattcgcgatttcgacagcgccagctttgccgcgcgtaaagtgaaaattcaagacgtggtgaagattattgccgagcaatatccaaccgcgaaggtgtcggtcgagataagcgatacctacagcaatatcagcagcgctatcggggaagatcgtcgcgctattgacttgatttttgaggcattgaaagaaattaaggtcgagcctaaagttatcccgatgcgtggaggcaccgacggtgcggcgctctcggctaaaggcctgctaacgccgaactactttactggcgcacacaatttccattctaaatttgagttcctgccggtaaattccttcgtgaagtcctacgagctgaccaaggcgctgtgcctgttggcggcaaaaagctaattcgtgataaaaaatttcgccccacagacggtttatggggcgaaataattttagtccatcaggacacggacctcgcggtactgcgggtcatcggcccgaactctttctgcgtaaattgaatgtagagcgtcagcaagaaggccaaaatgtagagcgcgctataggcaaagacaacgcctttcactccgacgaacggcagcaataacgtcgcgattgccggtgcaaagaagttgctcagcccggccgacagattacataccgatatcgccgccccttgtgctcgggttcgagtgcaggaaacagtgcggtcatcggcacaaaagccgccgtcgatgcgcctagcaaagtggcccccagcgccgctatccagaagttatcgccaaagtagacaggcagatagtaaaacgacaggctaaataccgcgcagccaatacagccataccagcgtattaatcgcagcattccccatttttgcgacatgatcccccaaaaaacgttaaacacgatagtcgagaagaagaagattgcccatatttgcagccagtctggcatcgtgaagcccagatcgcccacaaacagcagcggcataataatcgcaaacccgtaaagcgaaagcgtattaataatcctgacgacgctggccagtgcaatatttttattactcaccagcagcgtaacggcgcggctcatttcgctaaacttttcacgggtagataaatcgagcaaatgggttgaggttttaatatttttaagagacaccatcgcaagcattcctcccgcgcacacccagaccagcgagaaccataaaacattaagctcgccaatatgaacgataatcagactcggcaaataactgcctattacaccgatgcctaatgaatatgcagcccagaaccacccacatgccgatccaactaattcctcacgcacgttgtgaacaataactactatgaatgaataaagaaataatggataggcaagcccacgtattccataaaacagtaaaataaaatagtagttcttttgtgtaagaccaaaaatcatgaacagcacgtggaaaacgacccacattaaaaagcctattttcatcgccttctgtggcgtaatcacctcggcgataacgccagaagcccaggcagcaagcgccgcgcaaaggccataaaccgtgaaggcgaaggtcgcctgcgccggtgaaaaaccaatttcaacgatatattttgacaggaaagccagctcaaaaccgtcgccggtcatgaataaaaagatggcgatatagccccaaagcaagtttttgggcagccccatccagtggtctgtattcgctttcatcctaagcccttgttgtaataaattgatggttgtaaacaggcgacaataagtcaatggcatggagaagtttccacaaataaattttataaatcgtttctggaaaagtctcgcaccctccatctaatcaacagtaggcctatcaaggtcaacagaatattctcattatcaagaagccagtcacacaataagccatcaactcaacgacaaatacattagacaagtaaaacaccttattaaagagagccaataagatcgccaaatgaatattagcttaacgaaaagaataaaggtgacgacgatctaaaataacaaccaaaatgttgaagaaaataattttaaaaactacggtataagcaccaataaaaatacaataaggtcaaaaatgaatatattacctcaacgaattaaacaactcgttaattacggtccgcgtgattatcgcctggtttcagatgcgcctctaccgacacccaaggcccgtgagctattaatcaagatcagtgcctgcggcgtctgcgcctctgacgttcactgccacggcggcgcaccgatgttctggggcagcgcgaccgccccttcatgggttaaaccaccggtcgtccccgggcatgaattttttggtgaagtcgtcggctatggggaaggtgcgctggagcatttcagcgtcaagatgggtgaccgggttatcgcggaacaaatcgtaccctgcgaacaatgccgtttctgtaaaaacggccaatactggatgtgcgagaagcacgatatctacggttttcagaacgaggacgctaacggcggcatgtgcgaatacatgttgttcaaacccaccagccgcgttcacaaaatcccagactcactcactcgcaacgaatgcgcgctgatcgagcctttcgcctgttccattcacgccgtcaatcgcggagacatccagttcaacgacgtcgtggtgctgtcgggtgcaggtccgctggggctgggcatggtacaggcaattcgcctcaaaacacctaagctgttaattgtcctcgacactatccccgagcgcctgcggctggcaaaagggttcggtgccgacctggtgatgaacccgctcgaggaagacgtggtggcgaaagtgaaagccctgaccgacggctatggctgtgacgtgtacatagaagccacgggtaatccggcgagtgtcccacagggtctgcaaatgatccgcaagatgggccgcttcgttgaattcagcgtgttcagcaaagagaccaccgtcgactggtcgatcatcggcgaccgcaaagagctggacattcgcggcgcacacctcggcccgcactgctacgaaaccgttatcaacttttttgaacgtaagctgttcagcgccgagggcgttgttactcacacctattctctggatgaatgggaggcggcatttgaaaacgctcacagcgccgaatcggttaaagttttgttagttccctgaaggacgcacggccatgaaatatgttattggagtcgatgtcggtacccagagcaccaaaggtattctgatgaacgccgagggacgtattctcaccagcgcatcccgcggctacagcgtcgaaacgccaaagccgctgtgggcgcagcaatggcctgaggtttggctcgaggcaacaatggcggtgctggcagacattgtcaggcagtccggcgtagacaaaagccagattgcctccgtctgcattagcagtctgtacggcggatcggggatcgcggtcgatgaaaacctcataccgctttatccctgtcttatctggatggaccgacgcgcgtctgaccgcgtcgagtgggtcaagaattacgtcgacactaaggagctgttccgtattaccggcaactcgctcgacagctactacggttacaccaagatcctgtggatcaaagagcacgaacctgaggtctgggaaaatacccgtttcttcctgccgccaaacagctacatcaattacaagctgaccggcgaggtcgcggtcgatcactgttcggcgggcaatatcggcggtgtctacaacattgaaaaacgcgactggtcaaccaaggcctgccgcatgctcgggatccccaaatcgatgatgccctctcggctggtcgcctccgacgaaattgtgggcggtctgctgcccgagatggcagagaaactcggactggccgcgggtacgccgattgtggccggcggcgtcgatgccgccgtcgcaaccctggccgcaggcgttgtcgcgccgggtaaccacgtggcgatgataggcacctcgatgtgctggggctttatcaatcactccgtagacgcacggcacggccttattagcatgccgcacgtcaataatcctttgcaggatatctacacgtttggcggtgcgattaccgcaggcgcgtcagtgacctggtttatcgagcagttttgcagcgccgagaagcaacaggctaaagagcaaggctgcacggtgcaccatgtgttggaagaaaaagccaaatgcctatcaccaggggctgatggtctggtgtttctcccttatctgatgggagagcgcagcccaatttgggatgccaaggcaaccgggactctggttggattaagcctttaccacacgagacatcacatgtatcgcgctgtgttagaaggcatcacctttgcgctcaaagataatatcgagtccggcaaagcctgcgccgagcggttagacaacgagcttatcgtcgtcggcggtgcggccttctcggacatgtggatgcagatcatcgctgacgtgaccggctatccggttctgactatcaaggaggaggttgaggcaccgcttggggattgcttcctggccgcgaaggccgtagggatcattcaaaatgcagaacagataaagcagtggtttacgctggaagctcgtgcggaacccgacgcaaaagcccacgaaaaatacaacgcactgttcaacacctatcgttcaatatacaaaaacatcaagggagacatgcatcagctgtatgatttgaccaaaatggagtaagtaagataggacgaacataaccctaagtatttggcgctgcagcaagttggccctttccccggaaacctaaaaaactcagtaaccggggtgagccaacgctgctgcaacgtcaagtacagcgggttattttaaggcacccgataaaaactgctgcaaacgggcacttttcgggctaccgaatacgtctgcagggttcccttgctcctcgataacgccctgatgcaggaaaattacgtggctggagacgttacgggcaaactccatctcatgcgtaaccaccaccatggttttcccctcttcggccagtttctgcatgatgcgtaaaacctccccaccagctccggatccagtgccgacgtcggttcgtcaaacagtagcacctcaggctccatcgccagggcacgcgcaattgatacgcgctgctgctgaccgccagacaggttcaccggatacttgccgcgtgcacgctcgtcaatcccgactttctcgaggtaacggatagcccggtctttcgcttcggccttgctgatgcccagcacctgaatcggtgcctccatgacgttttcaagcaccgtcatgtgactccacaggttgaagtgctgaaacaccatcgtcagcttggtgcgcaacagctggagctgcttcttgtcgaacactttgagctgaccatcggtgtcgcgcaccatgcggatatcttgattattgacgctaatcgacccttcgctcggcttttcgaggaagttaatgcagcgcaggaaggtacttttcccagaacctgatgatccaatgatgctgataacgtcaccggcattggcagacattgagacgcctttgagtacctcgtgctcgccatagcgcttatgcagatcgattacggctaatttattttctgacatgatttttcccgcactggtttaaacgttttcacggttaatacatttttttcttagtgtgaagactgaggcttaacgtgcgccagccagcgtttttccgccttgcggaacaaactaatcaaaacaaacgagacacagaggtaaatcaccgccgcgataccgaacgcatagaacggctgataggtcgcagagttgatgtccctggcaattttaagcacgtctggcacggtggctgtaaacgccagcgccgtagagtgcagcatcagaatcacctcgttgctataggccggtaaagcggtacgcaacgcagaaggcaggatgatgcaggtatacattttaaagcgcgagaaaccgtaagcattggccgcctcgatttcaccatgcggtactgcacgtatcgcaccggcgaaaatctcggtggtgtaggcacaggtgttcagcgtcagggccagaatggtgcagttgaggccactgcggaagaaggcgttcagaaagtcagtgccacggacaatttcgaggctgtacatcccggagtaaaacaccagcagttgcacgtagagcggggtaccgcggaaaacgtaggtaaacagccagattggcatgcttatccaacggtttggcgaaacgcgcccaacggagagcagcacagcgagaagtcccccatcaccaccgagcttattaacagccacagcgttacggcgagaccggtaaaacggtagccgtcgctgtagagcagcgacatgccgtattgatgcaaaatgtcgatcatagctcagccctcttcacacccagcgaataccggcggttgagccacagcaatactccattggataaggtggtaaataccagataaatgatgccggcaacgatagagaagtagaaaggttgataagtccccttacctgccaactgcgttgccttgatgacgtcttcgaggccgagcagagacaccagcgccgtggccttgagaataacctgccagttgttggcgatgccaggcagagcgaaacgcatcatggctggaaagagaatacgtcggaaaatctgtgagccgctgaagccgtaagccaccgccgcctcgatttgtccgcgcggaaccgccataaaagcgccgcgaaaggtctcggtgaaataggcaccgtaaatgaatccaagagtgataatacctgcgctgaggggatcgatatcaatctgatcgatgccgatggcttcggtcagactgtttaacgcaatttgcaggccgtagaaaattaacagcattaataccagatcgggaacgccgcgaatcaacgtggtgtaggcgccaaacaatccagatataacccggttttttgacagctttccgcccgctccgatcaaaccaatgatcaaggccagcaccaccgaggagagtgccagttccagcgtgaccagtgtgccctggattattacgtgggaatacccgtatagcatgaacatatcctgtctttgacgataatcagactgcgtttcgcaggtttaactgggcttctcttttaaagcggcctccccttgcaggcaggccgccactacggaaacgactcctgtccctgatgtcgtcagctaccccttaaccgccgtacacatcgaagttgaagtattttttcgccagcttgtcgtaggtgccgtctttgcgcatggaatcgaaggctttgttcaatgcatttttcagatcgtcttcgttcttacgcaggcccatgccggtgcccacaccgaagaatttgtcatctttaaccgactcgcctgcaaacgcgtagcctttacccgcaggctgtttcaggaagccttcgctgcctgcgacttcatcctggaacgctgcgtcaagacggccggacgcgaggtctgaataaatcaggtcctgattctggtaggccactacgttaacgcccttaggctgccagttggcgttggcataggcttcctgagtagaaccctgcagaacaccgatgtttttgcctttcagggaatccagagtgggcaagattttagagccggtcggtgctatcagacgcgcgttggcggcatacagcttctcggtgaagtcaatttcctgctggcgtttctcagtgatagacaaagaagagatgatggcgtcgatttttctcgccttcagggaagggattagcgcgtcaaagtcgctttcaacgtaggtacatttgatttgcgcacgtttacacatttcattagccaggtcgatatcaaaaccgaccagcttaccgctggaatctttcgattcaaatggtgcataggttggatccgtaccgattttaattgcttttggcacggcagcaaaagcgctgcttgcgctggccaatacgaataccagaggaagaaccttgaacaactttttcatacataaccctcagccattaatcgtgcgttgttgtttgttgtgtttggttgccgggacaaccgttttatttttttgtcaccggtctgcgtcggtaacattttcaccactttcactactatgcagtaattatgcaatagttatgcagtaatcgtgccgactttgcggaactgtcgttttagtgaacaacgaaggcaaaattacattcagattagtctgcaaaatcaccggttaagcgagcgctaccgtcagattgaaacagaaacgcaccaaaataaaacataaagagttcaattttggtgcatcgttatcattctgtgcaaatttagggcataagggcttgcaaaaagctagtggctgccctgccagcgaacaaacaggtcttccggaagttcgatatcaaactggtcgataacccggtttacggtctgatcgatgatgtcttcaacgcttgagggacgatgataaaaggcaggtaccggcggcatgataatcgcgccgagttcggctgcggaggtcatcagacgcaaatggccgagatgcagtggcgtttcgcgcacgcacagcaccagacgacggctctctttcagcacgacgtctgccgcacgggtcagcaacccgtcggtatagctattgacaataccggacagcgttttgattgagcacggcagtatcgccatacccgcggttttgaacgagccggaagagatggttgccgcgatatctcgggagtcatggacaacgtcggcaagcgcctgaacgtcgcgcaggctgagatcggtttcaagcgccagcgtttgacgcgccgcattgctcatcaccagatgcgtttcgacctcaggcacttcgcgcaacacctgtaaaagacgaacgccataaatagcgccactggcgccggagatgccgacaatgagtcgtttcatggatacagcctcagaaatgacgaacttaaacttcagaacgtaggattaatcagaagactttgccggaatgaaaagcgattggcaagtaacggtgtcaagcggggataataccggagagaaccgtctgccttgacctgcgtaacagggtaagacagacggtaaaaaggcttaattaaccttcattatgcatttcgagattttcggcttcctgctgaccacgcaatgcctgagcatcgtcgttacgcagggcgtcgaggtattcgagatagctttggtcaacgtctttggtgacgtagataccgtcaaacaccgagcattcgaactgctcgatatccgggttctcttccttcaccgcgtcgatgaggtcactcaagtcctggaatataagcgcatccgcaccgatcatctggttgatttcgctcacttcacgaccgtgggcaatcagctcgttggcgcttggcatgtcgataccgtagacgttcgggaaacgcacttccggcgcagccgaagccaggtaaacatttttagctcccgcgtcacgggccatctcgacaatctgttgagaggtggtaccgcgaacgatggagtcatcgatcaggagaacgtttttatcacggaactcggcgcggttggcgtttagtttgcggcgcaccgacttaacgcgctcctgctgacccggcatgataaaggtacggccaacgtagcggtttttaacaaacccctgacggtacggcttgttcaggatacgggcgatttccagagcgatgtcgttagacgtctcagggatcgggataaccgcatcgatttcaagatcttcccactcgcgggcaattttggcacccagcttctggcccatacggcgacgcgcgctgtaaacggaaatcttgtcgatgaacgagtcagggcgggcgaaatagacgtactcgaacaggcatggattgtactgaggattctcggcacacatgcgagtgaagagttggcctttttcggtgatatacaccgcttcgcctggcgcgacgtcacgcaggaactcgaagcccagggtatccagcgccacgctctcggacgctaccatgtactcggagcggccgtcttcaagctcacgcctgccgataaccagcgggcgaattccgtgcgggtcacggaaagccagcattccgtggccgatgatcatcgcgacgcaagcatacgcaccgcggatcttcagattcattgccgtgacggcagcgaaaatgttgtcagcctccagcggatagtgctggaacttgtccaactcgctggccagaatgtttaacaaaacttcagaatcggaagtggtgttgacgtggcgacgcgcgccttcaaacagcgtacttctcaattcgtgtgcattcgtcaggttaccgttatgggccagtgaaatgccgaacggagagttgacgtaaaatggttgagcctcagaagcgctggaactgccagccgtagggtaacgaacgtgaccaaggcccatgttgccctgtaaacgttgcatatgccgtgcttcaaacacatccttcaccaggccatttgccttccgcagacggaagttattgttgccatcaatggtgacgatgccagcggcatcctgcccacggtgctgcaacaccgttaacgcgtcataaatcgactggtttaccggcataaaaccggcgataccgacaataccgcacatgttgtcttttcctcatcagcgctgccaaagttaaatatgctttggcaagaaactcgacgtgctctgcaggtagtcaaaaaaccacctgatgatagaactaaaatacgggatcaactgagactgcttccagtcatcaccgtgtgaaaagctggtgaaagtgtccagaaagaagagccctgctgcgacgatcaatacgccacgcagtgcgccaaaacagacgcctaaaacccggtcggttcccgatagtccggtacgatcgaccaaagagctgatcacatagtttacaatggcacctacgatcaacgtcgcgatgaacaagataccaattgcgatcccgtttcgaacgacttcgtcttcgaaacgcgtgaaatagacggcgaggtaaggataatagtggctggcaacgaagaaggcgcaccccaggttaccaatgataaggcctcgcgaacaaaacctcgaatcaggctgactaaagcagaaaacccgataaccgcaataatgacgtaatcaatccaaaccatcactttatcaatctcatccaggataagacccttcatctttctcgccaaagcgggaatgattcggggaaaaacttgcccggcatccaaatcgctgcgaattctaacagaaaaagaaaacgtttgcgtaggggaaatctgccggtcagccaaattaatcattgcggctaaaaaaacatcaatcaccgcaaaaagataacgaaacgttataaattcaagttacctaaaaagggcacattccgcttagtcttcgcgccccttaacctacaaacagacgccactgcaagcaccccggatacctgacaattcggtaaccggggtgctgtaggggaatcaaccaccctgtacgttaatgggtgaaagacagtttagtgggcggagtaggcacgcactacgccgctcaatccgctgacgcttttcagcgaagacagagaggcttcaaggttttgcttattggcttcaggcccaacgaagacgcgggtgatttgcccctgaaccggcgtggccgggacggtataagcacgatagcctgataaacgcagtttagcgaccacctcgttcactttatcagcatttttcaacgcccctaactgtacgacgtaagactgacccgccggggccttttcaggcgtctgcgggcgagtttcagttttagccgtctcaacaggtttaggctccacctttttaggctcaacgcgcttcggttcgaccggtttggtctgcgtctgccttggctgctctgcctgacgagattctgtcatcgcaggcggcgtcaaagttttaggctgcgtcgctttgggtgattcagttttcggcgcggcggtggcggtatcgccttcatcggcttctccgtcagcctgtgcggcggcgtgtgccgcctcggcagcgccagcgttgattgccgcactcgccccttctggcggctgagccggtaacgcctgcgtcacctgcccggcgttttcctgatcctgagaatccccggcttttggaaccagaggaatcgaggcgaactcgtcctcatagtgcttcttttttccatccagcaaccccgggagaataatgacccccaacgccaccagaattacggtgccaaccagacgattttgaaacttacttgccactggtattccccgtatccaacgcagccatcacatgcgctacggtatgaaatgatccacagactataacaatatcctgactttcagcatcctgcatcgcctgtttccatgcgctcaccacatctgtgaacgaaaaagcctcgggaagatgttctgtcaacgccgcgaccccagcaccgcgcggaccctcgagaggagcacagtaccagacatcaacctgcggtttcagacagtccaacgttccggcaatgtctttatccaacaacataccgataactgcacgcacttttccgccctgacgtggcaaatcagaaagtttaccggctaaatacccggcagcgtgtggattatgagcaacgtcgaggatcagacgtggagattcgctaacctgttggaagcggcccggcaaggatgcctgctgcaacccctgacgcagcgcgtcttccgaaacgttgatttcactatagtgcaatgcggccaacgccgtcgccgcattcgccagcggcacgttaggcagcggcagtgcgctgtaagccgctgtctctacgccttcgcaacgccagctccagtcgctgctgccgacctgataatgccagtcctgacccacgcggtgcaggtgcgcgcctttttcgttggcgacgtcggcaatcgactgcggcatatcaatctcccccacgaccgcaggacggtccttgcggaatacgcctgctttctcacggccgatgctctcgcgatcggaaccgagccagtcggtgtggtcgagcgcaatgctggtcacgacggaaacgttggcatcgacaatgttggtggcatcaagacgaccgccaaggcccacttcaaggataaccacgtcgagcgccgcctgcttaaacagctgtaacgccgacagggtgccgtattcgaaataggtcagcgaaatatcaccgcgaccggcctcgagcagcgcaaaggactgacagtgttcggcttcgctcagctcctgcccctgaatacgcacgcgctcagtgtagcgcaccagatgcggtgagctataaacgcccacgcgataccctgcggccatgagcacggcttcgagcgtgcggcaggtggtgcctttgccattggttccggcgacggtaaagacctggggagcgggagtcagaagattcatgcgcgttgccacggtatttactctgtcgagcccgagctcaatcgcctgagaatgaagattttcaagataatgaagccacgtggccaaaggcgacgtggcttcaggaatagagatgttttgcataagtcccgcctaacgtaatctgttcagattcataatgagcctgaaggacatgcattaccggacttttacgacaggcaatgcccctttgtcagtactgtgcgcacgacgctggataacagcccattttgtttatccccgccactggcgaggataatagcagaggcggcaagaagcttgccgccaattttcactcacaggctattgttgctgcctgtcaggcatcctgatgatgatcagctgaagcgtcgtctgctttgataacagggacttcggtgactttaggttcaggatggccggtcaacttggccaacacgctgcccagtttgttacgcagttctgcacgacgaacgatcatgtcgatcgcgcctttttcaatcaggaactcactgcgctggaagcctggcggcagtttctcacgtacggtctgctcgataacgcgaggacccgcaaagccgatcaacgctttaggctcagccacgttgatatcgccaagcattgccagactggctgaaaccccgcccatagttgggtcagtcagtacggagatgtaaggcagaccacgctcttgaagtttagccagtgcagcactggtttttgccatctgcatcagagacatcagcgcttcttgcatacgtgctccgccgctggcagagaaacagaccagtggacagttgtcttcaagagcctgttcgaccgcacgaacgaaacgcgcgccgacaacggatgccattgaaccgcccatgaaggcaaattcgaatgcagcaacaacgattggcatgccgtacagggtgcctttcatcacgaccattgcatctttctcgtcagtttctttctgagcagccagcaggcgatctttatattttttggagtctctaaacttaagcaaatctttaggctcaagctcgctacccaattcgacctcgctcccttcgtccatgaaagtgaacagacgcatacgcgcagacatacgcatatggtggtcgcacttaggacaaaccatcagattgcgctcgagttcagcgcggtataacacctgaccacagctatcgcatttggtccagacaccttctggaatgcttgctttacgggtttgcgagatgttgctcttattaagaattcgttcaatccagctcatcgatgacctttctgtttgaacctggcaaacgccagttcgctgttcatgctgtaacaagtcccctgcttaaaacaaataaccgtcccaaattatcaagaatttttaagcaactcgagccgctaaaaaacgtcctacagggagggttgctcgcaggaacagaccacaaatgtcgctcattaaaccataacagttagagactgtagataaaaaactggtcttaccctttggtttaatgcctttaattttaataattcacgccagggacagggtttcctctgccctacggcctgaccgctatcccgcgtttttagccgttttgcggtgacgaattacctcgataatcgccggcaaaacagaaacaacgataatggcgacaatcacaaatttcaaattgttctgcacaaacggcacattgccaaaaaggtagccagcgtatgtcagtaacagtacccagaatagcgcaccgatcacgttataggcggcaaattggcgataagacatgcgtcccatgccggcaacaaaaggtgcaaaagtgcgaacaattggcacaaagcgcgcaagaataatcgttttgccgccatgtttctcgtaaaacttgtgagtttgatctaaataactttgacgaaaaatttttgaattcggattggaaaatagcttcgcaccgaacaaacgcccaatggtgtagttcaccgcatcacccacgacggcagccaccaccatcagaaacgccatcagatggacgtcgaggctgttggttggcagcgcagcaagtgcccccgcaacaaacagcagcgaatcgcccggcaggaatggcgtaaccaccagcccggtttcgcaaaaaagaatcacgaacagaatggcataaacccagacgccatactgcgcaaccagctcggtgagatgcacatcgatatgcaggataaaatcaacgatatagtggatgaattccatggtattacctctaatgtcctttaatcggcgagaaaaagtgggcccatagtgacggctggtagagcaaacttttcaggataatcaacggcaacaagatacaaaccttcagccttggccgtggctgcagcaagatttctgtctttcgcagccaacaattcagccatccagctttcaggctggttacccgcacctatttcaaccagactgccgacgatattgcgcaccatatgatgaacaaatgcgttggcctttatatcaaccacaacataatttccaaaccggctcacgttgagatgcatcatgaagcgccaaggcgttcttgactggcattgaaccgcacgaaatgaggtgaagtcattttcgcccagcaaacattgccctgcccgctgcattttttcaacatccaacggcatatgaacgtgggtaattccatgacttaagatgccaggacgatagcgatggttataaatcacataacgataacgccgcgccgtcgcggtaaaacgggcatggaagtcctgcgggacgtggctcacccagcgcaccgcaatatcttttggcagatgggtgtttacccccatggtccaggcggcatccttgcggataaccggggtatcgaaatgcacgacctgaccggttgcacttacaccggcatcggtacgcccggcgcactgcacggtaatgggcgcgtcggccacgcggctcaacgccttctcgagccactcctgcacgctttcgacttcctgctgacgctgccagccgtaatagcggctgccgtcatattcaatccccaaggcaatgcgctcagccacggccggagacgcctgttcggagggttgctcaacagacattaataccaatactcctggatcaatttctcagccgtttctaccgccatcaacgcgccaccaaagcgcacgttatcggcgacagaccagaactggataagctcaggaataccgtaatcgttgcgaaggcagccgatgctcaatgaagcattacctgaagcatcgctgacctgggtcgggaagtcgtcttcgtcgctcaaattgatgtcgtcaaccttctcaagctcagcacgagcttcttcggcagacagcggacgcaaaccttcgagatgcacgacctgcgcatgaccgtagaacaccggcgactgcacgcagctaacggaaatcggcaggccatcgtcctgcaccacttttcgcacctgatcaaccaggcgacgttcttcgagcacgctgccttcgccgtcattcagcaacggcagcaggttaaacgccagctgtttgctgaagatgccttcctcggccggaatgccgttgagcaggcgcgcgctctggcccgcgagatcgtcaactgcggccttgccgagagcagaaacggagagcagagaagtcacgtgcaggcgagacagcccagccagctcggtcagcggcttgatggcggtcagcagttggctggtcaggctatcggcaaccgccacgatgttgcggttgcggtagtgcgtcagcacgtccggatttacgcccggcaccaccagcggcacgtcatgctccagggcaaacaggccgctgctgtcgataaccagacacccctgatttgccgcttcttcggcatatttcgcggaagcctctttaccggcaacgaaaaaggccagttgcacctgtgaccaatcgaactcggcggcatcgcgtaccagcatgctcttaccgttgtagcgaatggtttgtccggcgctgcgctcgctcgccagagggaaaagctcaccaaccgggaactgacgttcagacagtagctccagcagcgcgtcacccactgcgccagtggcgccaagcagcgcaatattccagccatcagacatgttggttctctccagaaaatttcagactacaaactaaaaggggcggcaatcaccgccctgatttatgaaaggatacgtcagtatgaagcgcgttccttaggggaaaattaaatgacgtcgctgctgaaaccgatttttttcaacaggtctgctgtttcgtgattatcacagtgaacctgcagcgaagaccattcacggcgttcttcataaaacttacgcaggcggtcaaactccccgctttttcccgcgacgcgacgcagaggcgcatcatcgcggcggacatcatacaccaagtgcgccagacgcagcagtttagcttctgtgagctcgccgcgcaggagaacttcgccaaattctggcgcaggcagcaggctagcgagcggaacgtgctgcggattgccgataaactggctataggcctcgaacacctgcgtggtgccgcgcgccttgccttccaggctgtaacccgcgatgtgagccgtgccgatagccaccttgtcgagcaacgccagcgacaactccggttcaggttcccagacgtcaagcacggcggtcagcggtttttcgccgttgagtgcgtccagaagcgccgcgttgtcgaccacttcgccacggcaggcattaataagaatagcgccaggtttaagggctgcgagcagcgccgcatccaccagatgaaaggttttatcgggaccagactgattcagcggcgtgtggaaggtcagaatatcagcctcggcgaccagcttgtcgagcggccagaaggtctcactgctgtcttgcgccgcgcgcggtggatcacacagcagcgtgcggatacccagtgccgtcaggcgcgcgttcaggcgagagccaacgttacccacgccgatgatgccaatggtcttgtcgcgcagagaaaaaccgtcacgctgggcaaggatcaacagcgcagagaacacgtattctacgacggcgatagcgttacagcccggtgccgccgagaaaccgatacccgcctgcgcaagccaaccgtcatccacgtggtcagtcccggcggtggcagtgccaacaaatttcaccggcgtatcgcgtaacaggctctcgttaacctttgtcacagaacgcaccatcagtgcatcggcagacgagagagcttctgttgggatcggacggccgggtacggcctgaacttcccccaatcggctgaacagctcgaccgcataaggcatattttcatcaaccaggattttcacgcttgtctccgctagccatgcaaaaaaattaagtttttatcaaacggaggccattttgccatagcttttcggctatatatacccagcgaattattgttcagtgcgaaaacgctgaggcgtagtacccgagatttgcacaaacatgttaatgaaggcggaagaggagctgtatcccacgtccagtgcaacctcgcggatgcttttcccctgttcgagcagggagatagcgtatagaaaacgcagcctctgccgccattcactgaacgccatgccgagctcttcctgacaccgacgcgacagcgtgcgctcggaggtataaacctgctttgcccactcggccagcgacagattattggccggatccttttccagtgcagagagcacgggtgccagcagtttgtcttcagaacctgggagataggcgcgaagtcgcggacaaatggcgatttggtcgagcagaacctggcacatgcgcatatcagcggcggttttaggcactgacaaattgcgcgcaaaacagtcttctgcgatggcgttaaacaccggcgtcaggctcagcatacaggccgactgcggcagcccttcattaagttcagcggcgatatcgatggcataaaagcgagtggtcttgcggttataacttgaatgtacgattccggcgggcaaccaaaacgcaaactcgggggcgcaaggtaacgctgtccgtccacctccatcgtcaatactcctgacttgacacagattatctgactccagctatgggagtgcggggcgtattcggtattggcgctcaccgtttcgccgcgaaacagtatcggctcgggaggctgggtagataatggaaaagagtgggcggcaatgcggctcttttttggggtgcccatataaaggtttcctacgaaaatgattcgccacaatgatgctttaataaattcgatctactctactcaatctcttgtgccactgggactcatattgtctggttagcgtcacaagatgtctggttatcagtatatctaaaaaaccagacagtaatacactaacgtgatcattcacattggactcaactcatgaacctgctgttccctctttttgccgtgctcatttggtctttaaacgccgtggtgagcaaagcagccgccggagctattgaccccgcggctatctcgttttatcgctggttactggcgttagtcaccctgacgccgtttatcctgccgagcgtgtggcgcaatcgcgccgaaatcaaaaaatattggtggaagtttatgatcctcgggctgctgggcatggtgctctatcagagcctggcctactatgccgcccacacagtaagcgcgcttttcatgggaattattgcttcccttattccgctactgaccgtgcttatcagcctggtggtgcttagcgtggtacccaccgtcggcatcgccgtaggcagcttggtctcactcggcggcctgatttggctggtgagctcgggtcaccctgaactgctgctgcaacagggcgttggcatgggtgagctcatgatgttcgccgcctctgcctcttacgcgctgtacggcgtgctgaccaagcgttgggccattcccgtgccaaactggcagtcgctttatctgcagattatttttggcgttgtgatgctggtgcctaatttcctgatggcaaacgacgtacaattgaacgagcacaacattccgctggttctgtttgccggtatccctgcctcgattattgcgccgttcctgtggattaaaggcgttcatcatcttggggctaatctggcaaccatctttatgaacctgacgcctattttcacggcggttatcgcggtactgtttctgcacgagcagctgcacagttatcacctcatcggcgggggaattaccctgattggcgtgatcctggcccagagactgcgaacgccactgtttggacgtcgtgaacccaccctcctcgttgaggataagcaggaaagttaagtcaaaagaatctctgctatgaaggtattcacggtgtcgatataaaagatttatctgtatgatgtcggccttgtgcgctcgacgccgtgtttaatattcttttatcccccaatgtttagcctgcgggggcataaaacctcttagcaaggactggtactatgcaacctttgagtggccgctcgcccgttgacgaaaatcgggaacagcctgatggtcaaacagtccctgccggagcgggtgaaaatcatccgctgaccccgctcagcgaaccaccctcgaaaagctgatcgtgaagctcatggccttaacgaccatgaaatccccgagatctgggccaacctgcgccacgatctgtcgttgccccatgacgccgaacttaacgccagccaatgtgcgcaggccgagacgctgctgttagccaagctcaatcaggcacaggacagccacgccacgcgccaactcatgcagcagctcaccgaactggtgccgctgggcaataatcgtcaggctgtgagcgaatttatacgccagaatttcggccacacggtgctcagccagcttagccatgaacagcttgaaaaggtgctggtgctcatccagtcgcgagagatggccattcctcagccacagcttacggcggtaatggaccgtcccctgcttcctgccgagcataacaatcttcaacagtcggtgaccaagctcagcgccgcgaccggtgaagccccggccaagatttggcaggacctgtttatgctggttggcgtcaaggtcggtgaccctatcccggccaaacatttccagctgttgactcagtttgctcaggtgaaaatcaccgttagccagcaaaccgcgccaacgctgaccagcctgctcagcgtgctaaaacagcctgcaacggagctagagcagcatcgtctgagcgactacgccgccagcaattttcatgcaacgcccaaaacccctctgctgcctgcccaggtcaacagcctgattaccgtgctgtttagtcagcgcgtggggaataccgttcgccatgaccgcccgcaggaaagacagccgcgtatctcgaactccacctcacgggtcaatcctttcgttgcgatgttgcccgagtctatgcggcccaacggcggcgtctggcttaccgttattatcctggtattgctcgctctggtgctgtggttagtggtctgagcaaggcttttagccattactcgcacccacagtcctgcacctcaacgttggccggataaacaccggcctctgtacctttcgccagcggatgcccgtcgcgtatccagaaatccagtccaccaatcagttccttgaccctaaaacccagcttcgccagcttgtaagctccttgcgtagaaccgttgcagccaatgccgtcgcagtaggtcacatacaccttgtcgcgagccagatttgccaccgtttcttcatttattaatcgatgtgggaagctcacggcaccaggaatgtggcccgcctgataatgctgctctgaacgggcgtcgagcaccaccacgtctggaatctgatgacgcaggtcttcggcgacgtcccatgcatcggtataaaaactcaatttggaatacaaatagtgctcactgacctgtggctgcggcggcggaaaagccaaaactttcgacatgggctgcatagaattctcctgagttcgttgattggtgcaaggccgatgaggggttttaactcctcacaccggtgttatattgccgccttttggtcttataattaagaccattttaacgatgagggtaagacccattttgagcaagcaaccggcctctcctgcccatcgccaacacggcgctctcatacaactgttcgaacagtcggatcttgcgtctacttcactgcgtgaccggctttgcgccgcactgcggcaggcaattcgtttgggcgcgctatccccacggcaacgcctgccgtcatcacgccttttggccaccgacctgcaactttcgcgtattaccgttgaggccgcgtatgcgcagattgaagccgaaggctatattacccgtcatgtggggaaaggcacttttgtcagcgcagaggtgcttgctgccgcaaacggggttaaccctctccagggcaacgcgccccgtaggtccacaactaaagcttcgcgcaagttgcaggacgataggccagcgttcgcccaggaaaagacctcgtccgccctgctctcggcgcgaggagccgagattattgccaccggtggatgccgggacccacagacgcctctgccgttcgccgccggttcaccggatttacgcgcattcccattaaagctgtggcggcaattgaccaataaaacgctcaggctgggcggtgagcggctgctggggtatggcgacccacaggggtatattgccctgcgtgaggcggttgcgggctatttgcagcagtcgcggggcgtgctgtgcagcgccgaacacgttgtgattaccaccagctcgcagcaggcactccagttgctcgccacgctgctcatcgacaacggcgacccggtatggattgaacagcccggctacctcggtgcgcgcaatgcctttgcaagcgcgggtgcccatcttcacgggatcccggtcgatgaacaaggagtggcattagccgataatctgccgccgccacggcttatttatctgacgccctcacaccattatcccacgggtgtcagcctgagtttaccccgtaggatagcgatgctcgattacgccaagcggcaggcgagttggataattgaagacgattacgacagcgaactgcactatgacggtcgtccgcttcccgccatgcaggggctggatactcatcagcgcgtcatctatctgggcacattttcaaaggttctattcccttcgctgcgactggcctacatggtgctgccgccagcgctggttgcgcctgccacgacgcttcgcaccgtttacgacggccacacttcgcagttaatgcaggcggtgaccgctgaatttatccagcaaggccacttcgccgcccacctgcgctatatgcgccagctttaccagagccgtcgcgacagcttactgacgcagataaagcaaaaactgggtgactggataacccctcagccttcggccgggggacttcagttggccgttcgcctgcctgtcgggcaagaagccatactcagccagcaggctcaacgtctcggcgtcattacgccggggctttcagccctctatctgcccaatgcagataccgctatctcgaccgtgaaagacggctggctgctgggattttcagcgctgacgccgggcgaaatcaccgccgccgttgaccgcctccaaaagctaggcaaccagaggcaataaccaccagccgacaagcccgctaaacgctaaaaaggcaaaagagtaatagtggaaagtgatccaaattttcttctctcccgacatccgcagtgcaatcaggttagcgagagacccaatgaccagaccaaaccctccggcattgacggcataggccagcagcgcattggcgggaacatagttcaccagcaaaatcgttgccggaacgttgctaatcacctgcgaaagcccgagccccagcaggtaatgaccatagtctggcagaccggcaatgctgcccaatgcctgctgcaaagcacccagccccacaatcagccggacatcgacaaacatagtgatgaacaccaaaatcagcggccagtcgatacgcagcagcacctgacgcgacatcaccagaaagccaaccaatacggcaacgagtccgtaacgggcaaagcctaaatcgacgcaggcaataaacagcagatacaaaacgacgcaagagatgagtagcggcttgctgaaggtactttggctttggctttctttcttcttgaggctgtgcgacgggaagcttatccaggtaactatcaacagtgcagccatcgtcaccagcgccagcggtgtcatctgagcaataaaatgcaggaacgattgaccagaacgattccacagcaggatattctgcggattgcccacaggtgtcagcaacgagcctgcgttaaccgccagcgcctcaaagacgatcagtctcgtcaccggcaacgacgtcagctttttcagcgtgatggtcagcggcaccacaataaacaacgcgacatcgttagtcataaaggtcgaaagcaccgccgccgcagtgactaaaaacagtgccagccagcgttcgttgtccagcgtatttatcatctttcgacccacaacgtcgaaatacccgctcagctcgacgcccttagtcagcatcagcaggcctagcagagtgacgatggtgttccagtcaacaaagcttataaactgcgatgctttctcgggctgaaagacggtgagaatcacgcccagcaacagtaaaatatgtaaaaaacggtcgcgcagaaaaggacgaaaaagcatcgaaaaggtttgagtcatcattaggatatcgcaagtttacataccggccggtaatgtgcagacgttaccttacagaaaagcattacgccagatgcgccggttaactctccgcgacgtctcgcaaaaaaagggatgctaatgcatccctttttcatccatcaccgcagtatattcggtgaagttatggctggcgcgccgaggtcatcggctttgagtgcggctctctggcctgacgcagccagcgcagtagatccacaattaggaacaccagcaggctcacacccatcaccggcaggctaaaggccagagcaatggctaacgccaatagaacccaacgcggcaaaacaggaaccgcccgccaggtctgaatgagtgttgcggttgggctacgttgaccggccatcttcggtctgcgctgccaccacaatacataaccccaaccaatgagtgcacaggtccccaacccaaacagaatcagcaccacctggttccacacgccaaacagaacgcccatatgggcatctacgccccagcgtgtcagcttcgccaggagtggaaatttggcaaagtagacgtgatcaacgatgcgcaggctggcgggatccaccgagacggcgtcaacgcgggtcggccaactgcggtcaatctcgctgaccgtccaggctttgctagccttgtaagcgggtcgaatttcgatttttgccgcatcaatacctgacgcccgcgcggcggccaccacgctatcaaagctggcgtcttttatctgcaatgcttgagccggtgcgggctgcatggcactcatgtccatatccggcatatcggccatcttcatgccactcatggaagcggcgtgatgttcggcgtgttcatcggcgacctcatggggtgcctcagcgctcaattgtgtggagaccgagggcgttaaccaccccatatcggcacgcaaaataccgatattatttcccgcccactgcgaccaggtgaggccggtggccgagaaaaacagcaggccgccgagcaatacaatcccaagcgtggtgtgccacagacgactacgacgctggcgcgcaccctgccgggtcattttacgaaccgatttctggccgccccgggtaaatgcccataatagcagcccgcccagtgccgcaacccacagccaggatgctgccaactcgctgtaattacggccgatatccccaacaaaagcccacggtgcaaatcatccagccaggtacgaaacggcaacacaccgctggtgccgtagacaaccaaactgccttttacatccagcgtaacgggatcgataaagatggcacggctttttgatgcacccagtcccggctcggaaaactgcacgcgggtggtttcgccgcgtgagggagccggtcgcacggcgtagatttccgcctgctcgccgacgacggcacgggcggactcgacctgcctcgacaacggctgaacggtgcctgttgatgaggtaaaagctggttagcatagagtttattttcaatttgcggtgtagcaacgtacagcacgccggtaagcgcggcgatgaaaataaacggtccaacaaacaaaccaatataaaaatggatgcgttttagcagcgccagcgcggcggctttggtactcaaatcgcccgccacagcggtgcggtccaaggattgactcatagggaatgtcctgaagcttgtcagtataaaatcaaacaacgccgcagccgcgtcggatgatagacgcaacggcaggttatcttgcaataaattgatttttaaacgctttggccgttatcaggcccagacaagttcaggtggcgcacgcggttgagcatcggtaaagacaggagcaggaataagacaggaagtaacgcgtataaagggagggcgaaccattctcgccagcgaccacaaaagcgggatcgcgagcagcaccagcagcggcaggtgcatcagcagcacgcaatatccgcaggcggcgtccatcatctccagaggagacatcgtgtcatacggcgtgctgttcccgctgttgtcggccaccgcatgctctgcccccacggcgtgtttgacgtgctccgacatcggcatatcgctcatcgccctatccgacatctcattcatcgacgacatctccatgcccgccatcatcggcatcggcacgccttgagcgaccagcgctttagagaccactggcgcgataaacagcatcaggatcgcgcaaattcccagccatgcggggaagcgacctcgcgaatgcgctatctggccaattgagattttcatcgttgaaaaataaatcgcatcttaaaatgtattcagtgaggagtgaggcgcagggaattgtatctgaaatgttgattaaatgcaggataattggagtgaaagtctgtcggccgtgatccaaaaaaagaaagcccgccagagggcgagctttcgatattcagcgttgaatcacaaaggattaacgatcgtttttcagcttacgcatcaccagcgtggcgttggtaccgccgaagccgaagctgttagacatcacggtagtcagctcacgctcggtaggctgagtcacgatgttgatgccttctgccgcttcatcgagattttcgatgttgatgcttggtgcgatgaagttgttctcagccatcagcagggtgtagatagcttcctgcacgccagcggcacccagagagtgaccggtcatggctttggtagaagagattgctggcgctttatcaccgaagacttcacgcactgcacccagctcttttctgtcgccgattggcgtagaagtgccgtgcacgttcaggtagtcaataggggtatcaacgttctgcaacgccatcttcatgcagcgcacagcgccttcgcctgatggagccaccatgtctgcaccgtctgaggtcgcgccgtagccgatgatttcagcatagatgtgcgcgccacgagccaaagcgtgctcaagttcttctacaacaacgatgccgccgccgcctgcgataacaaaaccgtcgcggtctgtatcataggtgcgggaagctttttctggattttcgttgaatttacgagacattgcgcccatcgcgtcaaactcacaggccatttcccagcacagctcttcgccgccgccagcaaatacaacgtcctgtttacctaactgaatcatctcatacgcgttaccaatgcagtgagcagaggtcgcacaggctgaactgatggagtagttaacgccacggattttgaatggagtcgccaggcaggcagaaacgccagatgccatcgctttggtcaccatgaaaggaccaacgcctttcaggccggtagaacgcatcgcgtcagaaccagcaacctggttacgcggagaaccaccaccggaacctgcgatcaggccggtacggtcgtttgaaaccatttctggagtcagacctgagtctgcaatcgcctgctccatggcaaggtaagcgtaaatagaagcatcgctcatgaaacgcgcgactttacgatcgataagaccggctgtgtccagtttcacattgccccagactttgcatttcatccctgcatcttcgaattcttgcgagaaagtgatccctgagcgccctgctttcagagactcgagaacttcctgcttgtcgttaccgatgctcgagataatgcccagaccagtaatcacagcacgtttcatttaatacctcttttactattaactattcgggatttcgccatgcactttagcgtacagttgtacgccgaacaagtccgatcagcaattcattatgtaaagaattgaaatttgcgcagagagtagcagacagttaaacttcgcgcacagcctagaaccaagagagttttacgtggatcacactcccatccaaccggccgaattacggtggaatgaacagggtacacctgtttcctcacagtttgatgacatctacttttccgaaagcggcggtcttgatgaaacacgccatgtttttcttaatggcaaccattttccagaacgttttgtcacgcatccgcgtccacttttagtcattgcggaaacgggtttcggcacgggtttgaacttcctgactctttggcaggccttctctgcattcagacaacagcatcctctgacaacgcttcagcgattacatttcatcagctatgaaaaatatccactttctgcagaagatttagacaaagcgctggctcattggccagaattagccgccttcgccgaggaattacgccagcaatggccactgccgttcgccggctgccatcgactgttgctggacggcggacgcatcacgctcgacctgtggtatggcgacgtgaccgacctgcttccgcagagcgacccgagtctgtttcaacaggttgacgcctggttcctggacgggtttgctccctccaagaacccagatatgtggaccgaaggtctgttcacctccatggcaaaactcacccgcccggaaggcacctttgcgaccttcaccgccgcaggatttgtgcgtcgcggattgcaacaggcaggctttaacgtcagccgggtcaaaggccacggcaaaaaacgtgaaatgctcagcggttggcgagaggcgggtccgaaagccctgcaccctgccccttggtattcgcgcactgccgccacacatcccgaagaggtggcaattatcggcggcggcgttgccagcgccctgctctcactggcactgctgcgccgcggctctcgcgtcaccctgtactgtgaagatccacaaccggctctgggtgcatcgggcaatcgtcagggtgcggtttatcctttgctgaacggcagacacgacactatcgagcagttctttgctcatgcctttacctttgcgcgccgccaatatacccagttcgcccagctgaatcttgtttttgatcatgactggtgtggggttgcgcaattaggatacgacgagaaaagtcagggcaaaattgaccagattatggcaggtgaatggcctcaggcgctggcgacggcgctgaacgcagagcaattcaccgaacaggttggcgtgccctgcgggaacggcggtgtgagttatccgttgggtggctggttgtgtccagcacagctgaccgcacaggctatcgcccacgcccagtcgctcggactggtggtgcattatcagcaccaggtaaccggcatagcaccgacacaaacgctgggatggcagttaagctttgccgctcaacccgaagcagaacatgccaccgttgtgttggcgaacggggcggatatcacccgctttgagcaaagcgacaagctgccggtttacgctgtgagtggacaggtttcgcacgtgccaaccgcagcgacgcttggccagcttaagcaggtattgtgctacgacggttatctgacgccggttaacccaaacaatcagcatcactgcatcggtgccagctatcatcgcgccgagcgcaagccactttatcgcgattccgatcagcagcagaaccgccagcggctcattgattgcctgccggggatagactggccgcatgaggtagatgtcagtgccggggaggcaagaaacggcgtgcgctgcgcctcgcgtgaccatctgccgatggtcggcagcgtgccagactacgttaagctattggctaactatgccgatttgccgcagcgtttgaagcagcagcaggagattgagcctgcgccggattatgccaacctctacgtattgggtgcgctgggatccagagggctgagttccgcaccgctcgctgccgaaatactggccgcacagataacggcagaacctcttccgctcgattcgaaaacgctggcggcgcttaatccaaatcgcatgtgggtccgcaaactgttgaagggtcggccaattaccccacctgagacgctttaacgcaatcaacagacgtaaaaaaagggcctcttaagggcccttttttgtcctgcaaagcgccagactcaacgttcggtttcaggcagtgctttctggtagaggttttcccacataccgagcaccagaacttggtcacgcggagagagttcaccggcctgaatcgccttgtccaggctgctttgaacccgggccttcagctgctctgagctgttctcgccgttagcttctgcctcggcaacggaaacagtcaaatgaccctgcagatagccgctcgcaaacagctcatcgtcggtggcgctttcaaccatgtcttcaattagcgcgaaaatacgcccttcaaattctgcaatcattctcttccttactgattcacggggcatccgcccgttgcgagattaaaagtcctgcggcgcggggaaagactcggcgctcagcgcaggcgtgttgtagtaggcttgcaacgcacggatgaaccgcgccgggcgctctggcaaccctttctcaagcattctcaacacttcttcacgtactttgcgctggaaacctatccggtccggttcacattcgccgctaagattgtcacagctgacgttaaagttaaagcctgcagcgacacagaacatccactcgtaagactgcggcttgatttcaaccttctcaaactcgctttgtgtttgcgcatcgcggccgtctgggcaataccagtaaccaaagtccaccagcttgcgtctctcagcgccggcaacgcaccagtgagagatctcatgcaacgcactggcgtaatagccgtgggcaaaaacgatgcggttgtaatcttcctgctcgtcggccggaagatagataggttcatcgtcgccgcggatcaaacgtgtgttgtgatcctgactgaaacagccgtcaaaaatatcaataagctgctgataataatgtttttctgttgaatctgacatagtgactgactaactcaaaataaagcaaaacgacaaaataacggctgattacagctgacccgcatgattatccagcagcgactggcagatggccggcagcggcggtggctcacgtttcaccggaataccgccgcccggtttcggcggaaggaaccagctttgcagctcggcgccgcaaccgtctcccggcggcggaggggcctggctctcacagttgtggtcgccaactgggcaccgcaggcgtacgtgcatgtgcgcccggtgaccaaaccatggtctgaccttgtgcagccattcacggtcactccccgcatcggcacaaagctgctgcttgatggctgggttgacgaagatgcggaccacatcagcatcctcagcggctaacttgataagcgattcgatttgcggctgccactggcttttgaccacgcttttaccgtcacggctgaccagatcgataggctgcggtttcagcagctgctgctcagtccaacgtttgcgcggcatctgtagccagatgtcgacgtcgaggccggactgatgactcgcgtgtccactgctgaaacgcccgcccgcaggcatcgccatatcgccaatcagcactgtgcccagcccttcatgattggcctcggaggacagtcgcttgatgaaggtcaacaggtcaggctgcccatagaagcgacgctgatcggtacgcatcacctgatagtccggcgagttaagcggcagcggcttcgcgccaatctgacacccattggcgtagctccccaccgcctgcggagcacccgcaataggttgggtaatacgctgccacggcgtgacggccaaagcaggcaatgatgccgctaaagccagtaatcccactaaaccgatgttaattcgcattctataagcgcactctctgctgtcaggcggtcttttgtcgcgcgattaccagcgcggaacgctggaattgacgtcaccgcactgtgcgcgctggcgcagcagatggtccatcaacacaatcgccatcatcgcctcggcaatcggcacggcgcggatgcccacgcaagggtcatgacgccctttggttatcatctcgacctgctcgccttcgcggttgatagtgcgacccggcacggtaatgcttgaggtcggtttcagcgccatgtgcgcgacaatcgcctgaccgctgctgatgccgcccaaaatgccgcctgcgtggttgctttcgaagccctgtggcgtgatttcgtcacggttttcgctgccgcgcttgttcacaaccgcaaagccgtcaccgatctcgacgcccttaacggcgttgatgctcatcagggcgtgtgcaatatcggcgtccaaacggtcaaagaccggctcgcccaaaccggtaggcacgttctctgcaaccacggtaatttttgccccgatagaatcaccggctttcttcagctcacgcatgagttcgtcgagcgcttccagctttgactcatccgggcagaagaacgggttggtctcgacgatatcccagtctttgagctcgcagcttacgtcgcccatttgtgccagatagccacgaatctgtacgccaaatttctgcgccagatattttttagcgactgcacccgcggctacacgcattgcggtttcacgggcagaagaacgaccgccgccgcgatagtcccgggtgccgtatttttgctcataggtgtaatcggcatggcccggacgaaatacgtctttaatcgcgctgtagtcctgcgaacgctggtcggtattctgaataatcagaccgatgctggtgccggtggtcaccccgtcaaacacgccagacaaaatcttcacttcgtcagcttcgcggcgctgtgtcgtatagcgggacgtgcccggacgacgacggtccaggtcgtgctgcaggtcagcttcggtcaatggaatgcccggaggcacgccgtcgataacacatcccagcgcaataccgtgggactcaccaaacgttgtgacgcggaaaaactgcccaatactgttccctgccatcacggctccttaaccattagttagctgttaaattcaatgacgttaaatctgatgcaaaccgcgaccccgcttattggcaggatacgcgttttgctgaacgaattacttcctgtacacgctgaagtgctcagcgcagtccagcagctgttgtttagtcagcatgaatacgccgtcgccgccgttttcaaattccagccaggtaaatggaatatcaggatactgatccatcagatgtaccatgctgttacccacttcacaaatcagcacgccgttgtcggtcaggtagtctggcgcgcaggccagaatacggcgagtcagcttcagaccgtcgctaccggacgccaggcccagcaccggctcgtggcgatattcgtccggcaggtcagacatgtcttcttcgtcgacgtaaggcggattggtcacaatcaggtcgtactgcagttcaggcagctcgcggaacaggtctgaacgaatcggcgtaacccactgctcgatgccgtgcgtttcgatgttgcgctcggccacggccagcgcgtcggcggagatatctaccgcatcaacctcggtctcagggaacgcgtaggcgcaggcaatagcgatgcagccgctgccagtacacatatcaagaatgtggcttggttgatcttgcaagatgccggagaagcggttgttgatcagttcaccgattggcgagcgcgggaccagcacgcgttcgtcaacgtaaaactccatgccgcagaaccaggctttgttggtcagataagcgaccggtacgcgctcgttcacgcggcggatcacccgctcgacgatgcggtggcgctcgctcgaggtcaggcgtgcggtgtgcatgtcttcagggatgtcgagcggtaaaaagacgcttggcagcaccagttgtacggcttcgtcccagggattatccgttccatggccgtaatagacattcgcggcattcaggcggctgacggtccagcgcagcatatcctgaatggtatgcagctcactgacggcttcgtcgacgaatattttatccaattttctctcctggggtacggcgggtggccatcattcatagccataaaatttccgcatagtttgccacgaagacggcaacaaatcagcagtaataccccattgttgcgagacttctccaaagacatttacttaaaaaggggaagaggagcaggtacactgtgaaaatgttcgacgaatgatgatattgcgatgaagaaaaaattttcgctgagtaaggaggagctggccttatttcgtgaggcggtaccgggcaccaagcgacttaaaaatgacaccatagtccataaaccggcacctaaaccgacggtgattacctcgccaaagcgtttgcttcaggagcaggtggatgcgacctactatttctctgacgagtttcagccaatgcttgacgccgaaggaccggtacgtcatgtgcggcctgacgtcagccatttcgaattaaagaagcttcgccgcggcgattattcgcccgagctgtttcttgatttgcacggcctgacgcagcacgaagccaagcaggaactgggtgcgctgattgccgcgtgccgtagagaacacgttcactgcgcctgtataatgcacgggcacggcaaacatattcttaagcagcagacccctctgtggctggcgcagcatcctgacgtcgaggccttccaccaggctccgcgtgagctgggcggtaatgcggcactgctggtattggtcgagctggacgataaaaccgaccaggaataacggctaacgatttttcgcggcccaaaatagcgaaaggcacagcaagctgtgcctttttagcgtctttcagtcacctcagctgcaggctttcgcaatcacctgagaagggctgtactgccagtcatagctgcctcgtccggtgtcagcgttgatttctacgctggccatcgccgaggtggcaaacatcggagggcactgtcctgggcaaagttccgccaccagatagccgaccaacggcaagtgagaaaccaccagcacggagctcacgccctctctcgccaaagcctgaagctcttcggctacttgtgcggggtcaccgcccggcgtcagttccggcaacacgtcaaccttttcaggaagagagagcgcctgacgcactttttccagcgtttgctgcgcccgaagataagggctcaccagcacacgctgaattttcacggagcgaccgttcaaccaggacgccatacataccgtctcgtcacaaccacaatcggtaagaggtcttactgaatcgctggccgcatcaagagcagcctcaccgtgacgcataatcacaacttgcatattgcaccgcttttgttaacaaaaatagcgctatacaggtacgctgagcgtgctgtattacccttctgcccacatcctagcagggcactacaaccatcacatcaaaacccaccgtatcgcggccgggcattttgcctgaaagtcaccacaaagaaaacgctgttttttacaccaactgcgaatagatgtaaataggtctggctatttaatgaacagcgcgatcatttttcactctgctaaccaagaattaccagaaaccttaaattaagccgtgatgcagatcacacttaatggctaaatttgcatcgtttcaaagtctaaaagatcgtctattttacgcccattacgttagctatacaatttttgcccattgtctgctcgggtgacgagcccttcacagggtgcaaaacgggtgccgtgcagcttctgcaatgcctgcagtctcttcaccaaaacgtcggcccccagcgcatcgatatagcgcataggccctccgaggaacggcgggaagccaatgccgaaaacggcaccaatatcggcatctcgcgcgctgcgcacggtgccatcatccagacaatgtactgcctcgttgagcatcagcgccacacagcggtcggccagcgcctgctcgctcagtttgttttttggcgtcacggctaacagcttgtaaatcgttgggtctggcgtttttttaccggacttttggcccttctgtggataaagataaaatccccgactattttttcggcctttcctgccgtcttcgagcaccgcctcaagcccgccaggcgcggcaaagcgatcgccgaaggccgactcgagaacaggaatgattttagtgcccacgtctattccgacctcgtcgagcagttgcagcggccccactggaaaaccaaagttgaccagtgagttgtcgatgtgttcaatgctctcgccttccagcaggcaacgcgccgcttcattcatataaggcgcgagaatacgattaacgtaaaaaccggcgctgtcaccgaccacaatagcggtcttgccctgttttctggcgaaagaaaccgtggtggcaatagtttgcggactggtctgcgcgtgcgggataacctccaccaacggcatcttatctaccgggctgaaataatgcaggccgatcacctgctccggccttgctgcgccttcggcaattttatgaatcggtaaagaagaagtgtttgaagcaaaaattgtctgcggagaggcattttcctcaacttcatggatcatcttctgcttaagctcaaggtcttcaaagaccgcctcaatcaccaagtcaacctgcgagaatccgctgtagtcggtcgtgccggaaatcagcatcatctggcgttgcagctcggattttttgaggtgcccacggcgcagttttttctgcaacagatcccaactgtatttaaacgagtggcttattccctgctcattaatatctttaatcctgaccgaaatattggccttggtagctgtcacgttagcaatgccgccgcccatcagcccgcctcccaagaccgcgactttgtggatttctcgcggttcagcctgcgcaccaaaatcttttttcaacgcggtagaggcaaagaaaataccgcgcagcgcggcggactgtggcgtcatgaccagttcaccaaacgcacgagcctccgcctcgtagccactgctgctgccctgactcagcccggtctgtaccacgtcaataatcttttcagtggcgggataatgtccgcgtgatttcgcccgcgtttgcttgcgcacaatatagaacagcagcgctttgcctagcggcccctgagctacacggtcaatgtaagacagctctcgtctggccgtatgccctttgcgaacgcgctcaatagccgtctgaaaaagaatagactgtggcacaacgtcgtccaccagccccatacgcagtgcctgttttgcgcggatgctgcggccggtgagcatcatatccagcgctttcggtgcgccaatcagtcggggcaggcgttgagttccaccggaacccggcagcagaccgagctgaacctcaggcaagccgagttgagttttatcatccagcgagcagattcgactgtggcaggcaagggcaagctcaaggcctccgcctaggcatgcgccatgaatagcggccaccacgggcaccgaaagcccggcaatgtgtgccatcacgccctgtccttttttcgccagagcctcggcttctgaggctttttcgcagcgcgcaatcatgctgatatccgcacccgcaatgaaggagtctttcttgccggaaataaacaccaagccttttaatttgggatgctgttgtgcctgctgcaacagtgagtttatctgctgcacaaactcggcttttagcgtattgactttctcatccgcgacatcaatggtgacgatgccgatattgtcctcggtaaaatagagggtgaaggccgaaggcgttgctgattccgttacatccgccggcaaaatcattggtttttggctcattctgccacctccacaatcattgccgcaccgaggccaccggcggcacaggcggtggtgagtccgagttttttacctcgccgacgcagctcgtgcaaaatttgggtgatcattcgtgcacccgtagcggcaaaaggatgtccataggccagcgatccgcccaatacgttgaatttttcccagtcaatttcacctattgcctgctcgcgcccgagtttctcacgcgcaaactgcgggctggcgaacatcttgacgttggccagtgtttgcgcggcaaaggcctcgtgcatatcaatcagatcaatatctgcgagcgtcaaccccgcgcggtccagcgccaccggcgtggcataggctggccccagcaacatgtcttcccagacatcgatggccgaaaaggcaaagctgcgcagataacccagcggtttcaggcctagctcgcgggcacgagactcactcattaacagcactgctgccgcgccgtcggtcaatggggtactggtcgccgccgtcaccgtgccatgcttgcggtcaaacgccggacgcagcttcacatactgctcgatgctggaatcaaagcgaacgttgttgtctttttgtatcacgtctttataaggcggaacgtgcgcggccatcacctgtgaatcaagcagaccgtcattccaggcctgtgccgcccgttgatgcgagcggtgggcaaattcgtcctgctgctggcgactgatgccatgggatttcgccatctgctcggcggtgtcgcccatgcgcaggccggtagagtattccgctaccgccggggaaccggcagcaggtcgcgtaatttgagtttgctgaacagcgacagccgctgagacaaagtgcgagccttgttgaggtcgaccagcgttttcgccagcgccttgctgacgccaattggcaaaacagatgaagagtctgcgcctccggcaataccgacgctcactgtgccggccataatgctttcggcaacgttggcaattgcctgaaagctggtcgcacaggcgcgagaaacgctgtaggcgtcggttgaaacgctcattccagtgcctaatacaatttcgcgcgcaatattaggggcttcgggcatctgcacgacctggccaaataccagttggtcgataacagacgggtcaatcccactctttgccagcaattcgctgaccacaattttaccgagatcgaccgccggtatgccgtgaaatgccgttgcctgcttggcaaatggggtacgcaggccgtcaataatagcgatacgatcgccctgacgcgtaaccagcggaatggccttgttcatagtggctcctgattcaataaaacggtcaatgctttataaattagcgggttattttatttttgctcggtttactggcctgatgacggtcaattttgacttttgtaacaggtctgacctgatgatcaagtgttaaccatctgcctgtcattagcaaagcccaagctgttgaattgagagcggcagcaaatttttcgaggaaggcatctaaaggggtatctgccgccggtgcggcggcagcaaggggaattaacgcagggcaagctggaagtttatcgactcaatctggcagcaaaaggtgaaatcagccgtaagctcaacgccgccctccacctcgttaaactgactgttgatgtcgcacgggtctgactcggcccggcgggcacgcgccgttaagtcttcaagcgccgcttctgcatcagcgcgggttgcaaaaacgttctgataagaggcggtgcagtcggtgttatcgatgatagtgcccacatcgacgcagcaacaggccgcggtttcctgtgcggcggtagtccgcgtaggtttagtcgattcagtggataattcggacatattttctcctttcgacgcgctattgcgccgggccagtggccgtgatgaatcattaaaaatgatagattctctggaaaatatcttactcctgcctcgcgacaagcactacccttacttttactatggtttttaagtgattaaaatcacaagactaataaagcgcaataaaactaatttattcatatgcggattagttcaacccgaatcgtcagttttatgaatctaaaccgttccctttttgttaagcggatctaatttttaaaatctaattaccaataagtgtgaaacaacgttgcaacatgtgtacaggtcagacctatacttcgctcactggtctgattagtcggcccaaaagtacaggacgctacaatccgccgctcattgttactcatgtgatagcccatgattagctttgttctataaaacataaaatgaggttttggtcatgaaccagaaaaacctgtttacgagatcagctgtggcagctgcaatggcacttgtttcatcacacgtttacgcggcaggattccagctaaacgaatacaccgcctctggactgggtcgcgcttatgccggtgaaggcgccatcgccgacaccgccgcctctggaagccgcaacccggcaaccatgaccatgtttgaccgccctacgttctccggcggcgcagtatttatcgatccagacgtcaaattaaccggcaaatccccggtgacgggttccagcctcgacgctaacaatattgccccaacccagtgggttccaaacctgcacttcatcatgccgctaaacgacagctgggcggtgggagcctcggccacgaccaattacggactctctaccgaattcaacagcggctatccggcgggccctctggcgggtaaaaccgacctgatgaccgaaaacctcaacctgagcaccgcctatcgccttaaccaacacttcagcttcggcgtcggctttgacgccgtctacgccaaggcaaaaatcgagcgtaacgccggtgagctggttgcgttgcaaagccgcggtcagatccctgccgacaccaccgccgcacacctgaacggtaacgcctggggctacggttggaacgccggtatcctctacgaggtggatgaaaacaaccgttacggtttcacctatcgttcgaaagttaacgtcgatttcgacggtaactaccgcagcgacctgccggttctggcaggcggaaccgggggcagcacgcaggccggccatttaaccctgaatctgcctgaagtgtgggaggtttccggttataaccgcgtggcgccgaaatgggcggtccactacagtatgacctataccagctggagcgagttccagcagctgaaagctaccgccaacaatggcgatacgctgttccaaaaagaagaaggctatcatgacgtttaccgcatcgccctgggtaccacctattactacagcgatgaatggaccttccgtaccggtatcgcgttcgatgacagcccggttccggccgacaaccgcacaatttcgattcccgatcaggaccgtctgtggttgagcgccggtgccacctatgcgtttagcaaagatgcgtcggttgacctgggcgtttcttacatgcacggcaaaaccgtacacatcagcgaaaaagtcgccgatggcgtccctaactatgaattcgatgctaaaggcactgcgatgctgtacggcatgaacttcaactacacgttctagtccgtttcgttgccataaaaaaaagcgcccttgggcgcttttttgttgtctgactgatatcgactcagttggcagagtcgatgctgtcgaggtcgccctgaatcgccgcagcgttcgggttaaccaccggcgtcagcttgccgccgtttgccaggaaatcgtgatgctggaagtacgccgcgcgaacaaactcatacggatcggacgagttggtcagcaggccgtcggaatccagcagctgtgcacgggtttcgatgccttcaagcgcccatttacccgcggtcatccaccaggtcaggtagttaagcgggaagtaaaggtcgtcgaccacgccgcccacgtcttcacgcggggtgaagctgccgtagcccggcagcaccgcgtaggtaccgtaacccacaccgtaatggcccagtgtgctaccgaagcgatgcggctcttccttcgccagctgcgggttagccattgacgcaacgtcaatcaggccgcctacacccagaatggtattcaggaagaagcgggtaaagtgtttcgcaccttcctgcacattaccttcaaccagatagttcaccatcgttgacggctcactcaggttgtcaaagaagttgctcagaccgttacgcgcaggctgtggtaggtaatcgcgccacgccacggcaaccggacgtaaaacataggggtctagcacgttcatgttaaagttgaacattgaacggttgaagccctgaagcgggtcagaacgcccgcctaattgaggatcaacctgctcgggagccggtggatttgacgcgttggccgctgtcggcaccacccctgttgacatcgtctttgccgaaggcgcagttgaagccgaagaggttggcggcgtagacggcgtaaccagtgattttggtttatccgcacagccaaccaataataatgtggcaaccgccagcccagtcaggcgaaagtccatcatgttctccctgtttatgcttcggcccctttttatgggacctgctgattaatctcgatattgacctgcccgctgcccgagaagttggtcaacggactgtcaccgtaccagtcgcccgatgccggtgtcgccaggccagtttgtgaaatacgcacacgtactttcagttgatgcaacgaagaaagcaagcgctccggcatcatggcattggtatcatcaaccgtgacagaaagcgggaatcggctgagaggcagttttttaactgcaaccggaaccgggctgctgccgtctgtcaccgaaataaataccgtaccctgctgaggaagctgttgctgcgcacgcggcgaaagtgtaaccgcaacgccgagtttaaccttatccatgcccgatttagctttagcctgctcaatgctggctttcaccatttcagttcgcttgtcgtcggcaggcagaattttcaacatcacctgccatgcgccgatcgcctgcggatagtgcccctgttcatattcattatatgccagcagactcaatacttgcagattcccctgattatgttcgagcatatcacgcaacatattgccgccgttgatattatcttgcggatcggtggaacgcgtcagaacatcagcatagcccagtttaatgtccatatcatttggagaaagtgcgtatgcgcgagcaaatgcctgcgtcgcggtgctggcattgttaagcgccatgcccacacggcccagcatcagccagtctttagcgttgtccgggtcattctgcaggtcggtacgcagaccgagaccgaggtcctgaatatccatcatattcagtggcttggcattctcgtccgcgacgcgagcgcgtaagtcaggcattcttttcatgacctgattccaggcactaacctgacctaggccgcctgcatacagataaaaaccaagagtgacgacgaccagtaatatgacccccggagccagcgtccagcgtgggattggtttccccgctttgctggcctgccccggaatatcactcaacagattttcctggagttcctgaacaaagataggacgctcaggcgcggcaaccacgccctgctgttcgtcttcttctagttcgctcaagcggtgatgatagaaagccttgttcagatcgtcgcgcgtgttggacagagaatcacgatcgcctcgaataacaggcacaataaacaacgcgacgcccaccagcagcagcgcaacaatgaccagccaaaaaacaatcatgattctttcctgtccttttcaccgagcagctgcgccaaacgcagtttctcttgtgaagacatctgctcttccgtttgacgacgacgagcgcgtaaaataatgaccagtgcgccaacaatgacaaacagcgcgggtccaacccataaaatcagcgtagacggcgtgaccggcggttcgtaggtcacaaagttgccgtagcgcgcgaccatataatcaacgatctgcttgctcgactgcccttgattcagcagctcgaggacctttttacgcatgtcagccgcgatgatggagtcagacgccgcaatgttggtgttctgacatttcgggcaacgcagctgctcggtcaattcgcgatactgctgttcctgctgtggcgatttgaactgataagcatcgatggcagcaaaaacgctaaagctcagcatcagaccaaagataagtgaaatcagtctcatgcgttgcctccgtatttattgtaaagcggacgtacttccttctgccagacctgctcgttgagatcaccggcatggcgataacgcacgatgccgttaccgtcgataaggaaggtttcaggggctccgtacacaccgaggtcaagaccgagcatgccgtcgccgtcgtacaggctcagcgcataagggttacccagcgtattcagccagttaatcgccttattgcggtcatccttgtagttaaggccaaccacgtgcacgcctttcgccgccagcgtattgagataatcatgctcggcacgacaggttggacaccaggtcgcccagacgttcaacagaatcggcttaccggtgtggaacactgactggtcgtaggttttccccggctcgaacagcgattccagcttgaacaccggcaccggtttgccgaccaacgccgactcaagtagagtcgggtcatcgccgtgcgcgttgcgggtcagctgcaccagaaacgccgcggccagcgccaaaaacagaaacaggggaataaagagaattttacgattcatgcttcctccgccgcttctttaccctgacgtttcagtttcttggtcattctatagcgcggatccaggatacacaggatgccaccgaccgccataaagatgccgcccagccaaatccagcgaacgaaaggtttatagtacaggcgtaccgcccacgagccgtcgtccagctcttcgcccagcgccgcataaagatcgcgcgcgagattaccgtcgatggccgcttcggtcatcatgctgtgtgccacgctgtagtagcgtttttcggcgtgcagcacggtcacgaatttaccgttacgggtcacgtcgatattggcttcaccgccagtgtagttggagcctttaatgtcggtcaggttgcggaattcaaaatggtaaccctgaatgtctacggtatcacccgacttcatgcgcacgtcacgctcgacgctgtagttctggctaaaggcgataccgatgacggtaacggcaacacccaggtgacccagcaccatgccccagtggctgcgagacagatgcgtcaggccacgccagaaagtgtgacggtgggtagcgcgctcgtgcagctccatcagcgtcagcaggataacccacactgacatcagcataccgaccacggtcatgccaacgattttgtcctgcagcaaccacggcagcagaatcgacagcagcaaggttacgaccagcgcaacgcccagacgacgccacagcttgcttggctcgtcacgacgccagcgtactagcggacctatacccagcagcagcgccatcggtgccatcagccaggtgaacatggtgttaaagaacggttcgccgatggaaatactgcccagtcccagctgcttgtgaatcaacggcagcagcgtacccagcaacacaaccagcatcgcagcaatcagcaggacgttatttcccagcaggaagctttcacgtgaaaacggctcgtgacggcttggtgcacgcaccgcgctgcctttgattgcgtacagcaacagcgagctgccgatgacaatcaccagataggccaggataaacataccgcgcgccgggtcagaggcgaaggagtgcactgagaccagcacgccggaacgcaccaggaaggtccccagcaggcagagcgagaaacaagtaatcgacagcagtacggtccaggccttgaaggtgccgcgtttttcggtcaccgccaatgagtggataagcgcggtaccggccagccaaggcataaatgaggcattctctaccgggtcccagaaccaccagccgccccagccaagttcatagtaggcccaggcagaacccagcacgataccaacggtcaggaacacccatgcggcctgcgtccacggacgcgaccagcgcgcccaggcggtatccagacggcctgccatcagcgaggcaatcgcaaaggcaaaggcgacggagaatccaacgtagcccatgtacagaatcggtggatggaaaatcaggccaatatcctgcaacaccgggttgaggtcgctgccgtcaatcgggaagttcggcagagtacgcaggaacgggttggaggtcagcagaatgaacagcaggaagccggtggtaataaggcccatgacagccagcacgcgcgctacggcgtcgttcggcatgcggcggctaaacagcgcaaccgcagtagtccaacagctcagcaggagcacccagagtagcagggagccttcgtgcgcgccccaggtcgccgccatacggtaataaaccggcaggtgggtgttggagttgttcgcaacgtaggcgaccgagaagtcgttcaccacgaacgcgtggaccagaatgataaaggctaacaggatacaaccgaacatgccgtaagacagtggacgggccattgccatcatccgctcgtcctgacgcgatgcgccccactggggataaatgctcaataacgttgacaggcccagcgccagacaaagagcaaaagtaccaatttcagggatcatgactggccatttcctttagcaggagcaacatatgccgaggctggccccgtatgattatctttcattgcgtcttcaacttccggtgggacatatttttcatcatgcttggccagaacctgcttcgccatgacgacattattaggctccatcactccctgggccactacgccctgcccttcccggaacaggtctggcaagatgccaaagtaggtcaccgcgatagcgccgcgcgcatcgtagattttaaagtgcacttcaagggtcttgtcatcacgcttgactgaacccggcattaccatgccgccgatacgtagacgctgaccgacaaacggcaattcatgatccttgcctttgccctgcaaaatttcacttggtgtataaaataaatcaatattggaacgcaacgcataaagcaccaggctggttgcgagccctaatccaaccaggactatcaacgcaaggtacatgcgatttttacgacgaggattcacgataacttctcccgggtggagtccggcgaccctggtgctgcacgcttgctattattatgcgcggcactggcctgttttttcgattgacggatccgctgttcgcgggactggcggcggcgtatttcagccagcagctggcgacgatgccagacggtatgaataatgatgccaaataaagaaaccagggtgacgatgaccgacagccacacgtaaaacgcgtagcctcccatcgcaaagaatgcctgccaggttgggaatgcagcgttcatcaacggcgctccttattgaccaacgtggcaacccaaggacgcagacgctcctggttgataataagattgcgcaggcgcatcagggtcagcgtaataaagaagaacagatagccaaataccgaccagaacagcggataacgcatgcttgggtcgatggttctgccaaagtcgctcgagccctgatgaagggtgttccaccactgcacggaatagtgaatgattgggatattcaccacgccgaccagcaccagaataccggcggcacggcccgcagtgcggcggtcctcgaaggagttgtataacgcaattacgccaagatagaggaaaaggagcaccagctcggaggtcagacgcgcgtcccacacccaccaggttccccacatcggtttaccccaggcagagccggtcactagcgcgataaaagtaaagacagcgccgaccggtgccatcgcggccatcgccagttcagacattttcatctgccagaccaggccgataaaggcagcgatcgccatcgagctgtagatccccatagaccagatagccgcaggcacatgaatgtacatgatccggtagctattgccttgttggtaatcaggaggtgcgtaaccgaagccccatacccagccgataagaaggcaggcaatacccgcaatggccagccagggaataaaacggccgcagacgtggtaaagccgctcaggccttgcgagttgatgtaaccatttccacattatttgtcgttgctcacgttaaaattacactgtgttaaatgccgtaaaccattatctggaaaactgttggcagtaagggctatttttggacaccttctgctcttttaggcacgacgcctattgttccctatcgagaagtgtgatgttagtcaaaggttgcgttttttcaggcgtattgtaaccacaagtaaactcattactctatttatgggtattttgaaataaaatgaccgcaaataacgcgacgtgataatcacatttgccgattagtgcacgctcacacgcagcgccgccgaggtagcaaagggggccagcgtgatgcttcccgctagcatggcacccagaatggccagatagccaccgataggcatcgccatcgaggcggcatcaatcgcaccggtagaaaaaatcagcaccggaatatacagcggcagcaccagcagactcaacaataccccgccctttcgtaatccaacggtcagtgcgacgccgattgcgccgataaagctcagcgtgggcgtgcccaacaacagcgtcagcgcgaccgcttcccaggttttaaagtccagcgacagcagcagggctatcagcggagaaatgattaacagcggcagcccggtcaccatccagtgagcgcacactttgccgataaccgtgagggtaagcggcgcgggcaatagcatcagctgttcgagcgagccgtcaagatagtcgtcgcggaacagacgttcgagcgaaagcagcgaagacagcagcgccgcgacccagacaatacccggtgcaatgcgcgccagcagcttcggctccggcccaattcccaatggaaacaaggtaatcacaatcaggaaaaaccacagcgggtttataatctcggcacttttacgaaaagcgattttcaattcacggcgtaaaactttaataaacattaggctagctctgcactggtcagacgaattttacgcaccgcacgcgtgacgcccggtaaatcctgatgcgtggtcaataacaccatgccgccgttttgggcgtggcgctcaaaaagttcgataagcgtggagacgccctgtttgtcgatggcggttaagggttcatccaggatccacagcggcgcgcggctaatccacagcctggcaagggcaacacggcgctgctgaccggcagaaagttgcgcgacagccacgtcttcgtatcccaacaggcccacctgctccagcgcgtgaaatatctcgtcctgcgcgtcattcccactttcggtctgatagaacgacagattctcataagcggtaagtacagacttgatccccggatagtggccgagaaacagtaaatgctgatgaaaaagctcacgctggcggcggatgttttggccctgccagtgcacttcgccttcatctggggaggacagaccggccaaaatacgcagtaaactggttttaccggctccgttctggccttcaatctggactatctcgcccggctggatggtgaaacttaagccgctaaacagggttcgctcatcgcgaacgcaactgaggttaagcgcttcaaacatggggcgagtctcttatctttcgggaatgggcataatatcataagccttacaaaccctgtaggctctcgctgcgcagtttaccgctaactaacttctaatttacagaaaaaacacagcctttagcatcgaataacaagttcttaatgctctgttatttttagatttctcaccctcaaaccgagtggcggattaaaaaataatctatccttgttgaatgatacaaaatgtaaccacgcttttttatacccattccggcgttatttgcctgtgtactttcaccaagggaataagcgatgaatccaactcgttcagcaaaagacaatcttaagaatggccctgacgttgacagcgaggagcgcgaggacggcagcgagattgaggtcgatgaagagaatctcccctcacgagccgccgcggtgcacgagcagatccgcatggagggtgagaaagagctggagcgcgatgggctcgcactgatgtggtcggcgattgccgcaggcttatcgatcagcgcctcgctggtcaccaaaggcattttgcatgaacagcttgcagacacgccggcacggtttttccttgagaacctgggctataccgtcggatttattatcgtcatcatggctcgccagcagctttttaccgagaacaccgtaaccgcggtgctgcctgtgatgcataaacccacgttcaagaacttcggcattctgtttcggctttggggcgtggtcctggccggtaaccttatcggcgcagcctgcgcgtctctggcatttgtttcactgccgctgtttgaaccgtctattttgcaggcctttcatactataagtatggaggtgatggaaaaaagtccgacccaaatgtttgttggcggcgtggtgtctggttggctaattgcgaccatggtgtggatgctgccgagcgccggtgcggcgaagatttgggtcattctgctaatgacctacctggtggcgattggcaacctgactcatatcgtggtcggctccgtcgaggtactgtatctggtgtggtctggtgcagaaccctggtaccgcttcctgtggcccttcgccctgccgacgctcgccggcaacatcattggcggtacctttatctttgcgctgatcagccacgcacagattaggaacgatttaagcaaccaacgccgcaagtccaaaaatcggcaaaaagaacgcccaaaatccgtaaaatgatgaagtaatgagcaaacggacctgcaaagccttatttttaggatgaaaatgggtatactgtgcgcgctgccgctcaagcagctgtgtctccttagttaaacggatataacaagcccctcctaagggctagttacaggttcgattcctgtaggggacaccaataacacgtttgcctaggttcactaaactccgtaaatctcccagaaaatcagccgcatgaagactgtaatcgctaaacttacggctgccattacagcgcctgccagtggaataccacgtacgctaaaactaagatctaatactgttccgcccacctaggccattacccagattaaatgctgatacgttgactgaacgagcctgagtaagtcattgttacccagtttagtggctccgcatttccctcactcagcgtcatccgaaaagcgatcggctcgatattctttatgatttaccctgctacgttttctcctccacacttcgtgaagtaattctgtgattcgttttgctgagatgggctgttaatcagtgcaggatcggacgctcctttcaatacaccgaacgcggggatgacccatcgggtcttgagtaaaacatggatatagaaacgaccgaaaccgacatagccgccgaaggaatttttaccgtttacctcgccgcagacatacccacttactccgtcagaaggctgaacgctgtctttgtgaaagatgacattgcggaaattcgcgctcgcaggatccttcaactgttgcgcgatagcctctttgccatagtcgatcactttgctgtcgctcggattacaccctgaaagcaataacgcacccaatgttgccagagcaaactttctcattcctcgatcctcttatgaaattggctcacaaaacgctatcggtcagcgtattatcgaacatttcgctgcaaacgtaatcacaaccagaattcttctatcggaaataataatcagatgcgtcttttagctcttcttgctctaacgtcattgctgacgcttaacccggcaatcgcaaaacaacacacacgtgcggcagttcaagatgatgaactcatcgaacagggagattacaccaactctgatgggcaagaggtccaccgcccggcgcacagcaaatcagataaaattccagacggtgcctcagcaaaatgtcgcgatggtacttacagcttcagcactcatcatcgggggacttgctccggacacggcggtgtgtccgaatggctgggataattattcccttcagagtgaaataaagccccctctatatttaaaagacataaagaaaaaagcccgcgataagcgggcgagatttgcgaacataactggctgtctattggcaacacctatactggtgcctatgactagcttagaatattgaaaataatctgccagttaaggacgttgcctcagtaaattacttgttcgaagtggcctcaggatcgaggtatcgacggctttttcggcttcctgcaggctgtagtaaatctgcattttcatccagctctcgggcgtactgccaagaacaacagagagcttaatcgccagctccggggaaagattcctttctttggcaagcaggcgagaaatagcggagggtgcaatgtccattgcacgagcaagctctctgacaccaatatctagttcgcccatcgcggcggcaacaatttcaccagggtgggagtaacggacttgaacataatccctctccatcttattcataacctctttataaactttgtcttaataccactcagtcggggccaatagccaaactgcgttcctgtcttataaattgaaaacacatcttcgcctctgtgcgttaatgcactctcctctcgtaggatggactctgagtttcccggcgcagagtttcggccaccgaggcgataaaggcctgaatgcaagtgaaggcatattcgaattcactgacttcgaaatactcggccggtaacagctcttctgaaatcattaaccgctgccggcattctgctatttgagccaaatgagcaaacggccattggggcgggtttcgcagaatggcaccaaaataaagccgcacgaaatctctttcataaaaggtctgactttcgagaacacgatgtacggcgcgatgccagagagtctcgagggtaataaagtctttaagaggagagagcatcagcgaggtccgtacgcccagaagcgcttcctcaaaagccttatcccactcgctcccaagacgttgacggcgcaggcgtatcgcatggggctggctgttaagtaacgcgcgagcaccatacataagaaatgattccgttatctcaagcagccgactgtaaagcagacgataagtctttatcgtctgcggcacgtcaagcagctggtgcagagtgataagctgagcctgtatctcctggtggcgtaactcactcgctctaagagacaccgctaaccaggctcgctctttgtcttcttcttcgtaaagctgcgccaaaaaagacatgtcattgccctcctctcgctgcgtgatgggtgatgaacctgttcaatgaataacgagtgaaaatcattctaacttcaaagtattaatcaaaaatattgattataaaaaggcgctcctccaatctcaccacacgagggagtcaggaggagccaacacagacaattacatttgttattattttatttacttaattatgcgtagccacacgaaaaaaccagggatccttctcttacaaaaacttcttgccaactggatataatgattacttacgtaactaatcaaacacggttgatcaatgattattgttaagattaattattgtattcagtcacgtcgtcgtaagcagagtcccgcatgcatcatagagttatcttctttacttagcctgttaagcgttaaaaaatactttcattttctttagcctcttcaagaagctgtatcgcaagcagcatggtctgttttgaattacttttctgattcttcatgaactttaattcatcacggagcctttctgcgatcatcgttttatttgattccacaccattcatcgcaaaagaaagcgcgatctctccgataatctgacatgcttcgccataatgaatgtttcctttattattattcatttttcctccagaaaatatcaccaatttccttagattatccgcttatggaaaccattaaaaagcctcaaagactaaatctactttttcaataatctccaccccagaagaccgttcatttaaattattactggcgccctctcgcaacaacgggttcctacacaccttgtagttattatcatcatcaacatcgatgaggtaaaacttcgcacctatcgagattagggtatcaacaatcgcattaacctcatcaggattggaatttattttctttaatatcgcaatgcttttggaactattgaaatttgaaagagacagacctatttcaaataaccttgctaacgtattttcggtggtaataatcataatttcgtcacctcatacatgacaacgcccctggcatcgaattacagctcaaaaatggacatcaacctaaccgtaatttaatgctatctaagtcactgatattgatcaagttttttaattatgatttagctaactcattgataatgatcgtttttatgattataaatttatcttattaagctgccagcaggtcatagaggctttctgttccatttttgcaacttatacacacagcttatactgtacaacattttcccaccccaacaggacggctaattaatgactctcgtaccactaaagtagtactaaaacccctacgataaaaacaaactctaccatttgttggatgatacaaaaaaaatatacaaaaactgcatcttaaagataagaaaaaaagtttcaatcacttttaaatcaaattgaatgacaattatcattaaataattgcattaaaaaccgcctgttttttttataaacaaccaaaaaaataattttaacttattgatttttaatgattaaaataatattgcatctaaggcttcatcagaaatgcaggacaaagaacagactaaaaatgaggaggatttacattaaatcaattaaaatcaacaacttaaaaaaacaacgtctagaacgcatcattttcttcaagtttccctaagcggtaattttttttactggagtttatagggataatagtttatttattaaaaagtggattgatgtttccacagacaaactttggacgtacttcatcctgccctttccgggcgggatgtttttttgtgcagggaagtattttttatcacgaggaaaatttatgaaaaatgaccccctaaaagataaagcagaatgcccattctgtcatagtttactcactaaaagtgccactcaatgtatccactgtggggctgaaatgatcgacggatatattaattccaaacaacgacaaaaaatgttaaggctgcgcatcgttctgctcgccgcttcttacactgcactgtatttcttatatcagtcagaagtcagtagtttattacttgttgttttttatttattcctctccattggatcatggattttacccttcacttacttcaagtttatcaataggaaaaacagcgtctggaaacgaaagcctttcccatggtaaatgtgttatttatcagttttacttatcatttaaactctattttaacttagccatcgattaggctttaaagagcaccaacgtgccttttagttttaaaggataattcttattgtgattttaaaatgataaagccctagatttctttttaaaatacatcaaaaaaaatgaaccattagacaaggtgtcatttcaccgtttcacggtttcttgtgcttcctctttccggctggtcccgatggtggtccagccttgtcaggcaaaagacatttgagtgttccaaccttgctcaacgatgagccaccctatgccctcgcgcagggatcatcttcgattcaaatcataagcgcatgacgatgagaaaataaacggagggggtgccatctttgatgcgctgatgccagggacgatagtgatgtgccgctgtcgctcaacgagaaattcagagtaagttgagggttggtaggattcgggttcggagggaaactagaaaaacaacgctctattaaacatattgcaagccaatgaggctttgagataagacgaaccatgcagcaaaattgttacgcataatagagcggtgaatgaataatacaggcaggaggaaacgctaatcgtgagtgattattttttaagccgctttccgatttcagcagcggctcttacaatcacacggcggacagcggggcgtacatcaatatctgtatcggaattctcaacttcttcatgaacccatccagaataaccatcttcaataaaataatgtgcgcttgcatactggtgtgattccattccatttttgaaggttcttacatcaaccccaagtttatccttaagttcaaaagcttctgcgtcgctttctaatgggttccacccattgccgataacaaatccattcgtctgcgaaaaagctaatccagcgaatttcagcaactcgtgattgtccataatttactctcaatagttgtacgttttttgtcaggcaggaatatattctagcactttcgaccttatttttcttgattatatttcctaacacatataattccgccattgaatacggggttatatacgtcataaaaccagcaaaattatcaagttataattgctaacagttctggtgttttagggaaaagacgaaaaaatattatcgctaaactttcggggaataatcttgatctcgatcattattacttaaaaaacattaaaaaatgacatgggaataactttagacttatctgacacttagaggaaaatcatctctaaatgatgcatattatttcagagtgtgtgacccagcaggaagcgaatggcagcccttgttatccgcatgtttttacgttcgcgggggcaccaagtttaagggagatatatttattcagttaatattatgatcgcaacataaaactcgattaaataataaccacaaaaataacctctgttaatgttctcaccttagagcacgggcaacacattctgtttacctaagctctagatttttagtaagataaaatttagtgattaatattcacttattttgcgatgctctattcttccgccatcaggcaaaataaaagataacaacctacgaattatatacaatacggcaacatttaatgaataataatttaacaaacaaaacaatcacttgtcctttttgcagtaacgttcttcttgacgatcccgaccattgcaaacgctgcggggcagagatgaagaaaggttatatcgaccgttcccaaagacgctgggtatttatactgcgacttatacttttaattatttcttcactgactttcttttatttgcagcctgttcacgtgggaattgggctgattggaatatatgcagcattaataatactctcgctaattattccatttgcatttttcaagctgaaaaataaaaataaaaacgtctggattagaaggcctctttcctggtaacagttttgcgggtttcatcgcaggattgttcaccctaaagcattaattttaaacattagcttagtgcctgtacgaaacagcgatactctgtgagtgcggcaccttacttcaggaaacaatcatgaatgcgaacgagacttcccctgcaaaaaatccagcaaaaaagcctaaggtcgatcacctgcgttttcaccgaaaacatcagaaactgttacctacgttcggcgaaaactggtttgccctcaaggctgaggcctttgcacgctttttcggcacaccgctctttttaggtgcgcaaacaattatcgtggtggtgtggatagcagtgaatgaatttggctgggctaaatttgatatctatccctttattcttctcaatctggcgtttagtctgcaggccgcttacgcagccccactcatcctgcttgcacaaacccgccaggcagagcgtgacaaagccaatgccgaagcagatgccctgcatcgggaagaattagcccatttgaatgaccagcggttagaaattgcggcacagcaaaacgaacaaatgttgaagctgctagaacagaacacggaactcacgaatctgaccaaacagctcaccgaaagagtggagcacctgactatcgagcttcataaaaagctgatggaaaaagaataaaaaaacccgacggcaacgtcgggttttgtcaatcatagcactcgtgaatcggtttaacgccagcctagtgccggtgcgatatgtttcagaatagattcgataacatgcgcattgtaatcaaccccaagctggtttggcacggtcagcagcagtgtatctgcttcggcaatcgcctcgtcctgtttcagctgttcaatcagcctctcaggctcggcggcgtagctgcggccaaagatagagcggttattctcttcgaggaagccaattttgtcgccttcctgtccacttcgtccaaagtacgcccgatccaaatcgttcaccaaggcaaagatgctgcggctcaccgatacgcgcggcgcgcgcgcgtggccactctccttccataccttgcgataggcgcgaatttgtttcgcctgttggatatggaaaggctcgcctgtttcatcgtctttcagcgtcgagctttgcaagttcatgcccagcttggcagcccactctgcggttgcattagaacccgctccccaccagatgcgttcacgtaggccctctgaataaggctcaaggcgcagcagccccggtggattctggaacatcggctgcgggtttggctcggcaaagccttcgcctttgagcacctcgagcagcgcggtggtgtgacgacgcgccatatcaaactcagtttcgccgtctgaaggctgataaccgaaatatctccagccgtcgataacctgctcaggtgaaccacggctcagaccaagctgcaaacgcccacccgaaatcaggtctgccacgctagcatcttcagccatatacagcggattttcgtagcgcatatcaataacgccggtaccaatctcgatgcgacgggttttggcacccaccgctgaaagcagcgggaaaggcgagctaagctgacgagcaaaatggtgaacgcggaaataggcgccatcggccccaactcttcagcggcaacggccaggtctatcgattgaagcagagcatcggcggcagagcgcgttccagactgtggagaaggcgtccagtggccaaacgacagaaaaccaatcttttcataacgcatttgtccttgtatacggaaactgcggtgcagagtaatttctagattgtttccatcatagtacactcgcccgtgcggcacagtggcaggacatggcatgattattgagtatttttgatgtaatagttccaatatcttgaacgatagaaacaaaaagagcgcacatggcgctctttgagaagacttcgaaagtcaggctttgcaacccaactccgcttcagcgatttagcaactcacgttcaatgcgctcacgcgtcgcgaccgcctgatgtggcatcttttcagggtagccgaacagagaagtacagataattgactcaccgccgaccttaaatttacggttagcgaagtccatctggcgcaggctttcgaacagtgcgtcaaaattcacttcaccctctccgatgcccacgtgttggtgtacaacggcatctacacccggtggattgacgatatagcgacagtgtttggtgtggttcatggtatcggcaatcagcacgtgtgacaggtcgctccccgcgtagtccagcatgctcgctacatcgcccttacctttgtcatagaagaaggtatgcgggacgctgtaaagatatttaacgttgtcgctacgcagtgatttcaccaggtcagccgtttcgttgttttcttcacagaagtcccacggatgcgactggatctctaaacgaatgccttcgcgctcaatgatgggcagcagttcttccatcgactgataccagcgttcttcgcagatctcaggctgattcgggtcacccgacaactcggtgttgatcacctccacgcccatgtcgacggcgatctcaatcattctcttaaagttacgtaccgccgcaatacggcgatcgttatccggaccagaccagcgataaaccacaataaatgacgaaatttcaacaccatattgttttagcgcacgcttgtattcattcatcacatccaagcccgctttcggatgcttataaaatgggttaatgcgcggatggggtgattgttcgatatatttatagccccactccgacacctgcctcaccatatcggtgatgcttctatccctgataacgtcgacatcaaaagcaattttcatatccggctccgcactagttgtagggtaacgcttaatcagtcatgcaatagcgtgattaatattcacgcgccttatcaatgttctcacgcagcatctgcgccaccttatcaactgactctttttcagaaaccattgcgccaccgacgcgccaccagctgaaatacttgtggatcatggttttaggcaagactttaatgtcgataagtgtcgatactttctgacattttgcatcagccaacgcctcgtgcagctcctcgatcgtggttacggaataggttttacagccgtaaccctcggcgattttggcgaagtttaccggcacgaaaccaccgtctagcttcgaggttgagtctgccctgaaacggaattcggtgttaaaactgtccataccgtgttccatttgcaggttgttgatacagccattcgtcatgttgtcgagcaggacgacattaattttttgatgttcctgaatcgatgtcaccagctcagagtgcagcatcatgaaagaaccgtcaccgaccagcgcatagacttcgcgctcaggttcggccattttcacgccaagcgctgcgttaacctcataccccatgcaggaataaccgtactctacgtgataaccgttagtgtcggtcgtgcgccagatacgctgaaggtcacccggcagactcccggcggccgcaacgatgacggcgtctttatcaaacgagctgttcaaggtgcccaatacgcgactctgcgtcagcagcgaaccggtcagtttttcgaattctgcgtagaccgctttcctgtccagatgatcattgatttcagggatgaaatcttcgccgctgtagtctacctggtatacacgtttcgtttctgcgatcagctcttcgcgaacatcggcaatctggtgtccccatgccgcatggaaatcgcttcccagcagtcccttatccagcgcctgtagaccctcacgcgcatcggctatcacatgaacggcatcgagcttaaaggcgtcgaagcggttgacgttgatattgaggaaagaaacatcgggattctgaaatatccatttcgatgagctggtgaaatccgtatagcgcgtgcccacgccaataatcaggtcggcctctttcgccagctggttagccgccaatgtccctgtttcaccaatgcccccgagattgagcttatgctccgaggtcaacgtgcctttacccgcctgagtttctgcaaacggtataccgtaacgttcggcaaactgctgtagggctaatccagactgagagtattttgctccgccgccgcagacgattaacggtttacgtttgcctttaatcagggccaacgcatcggtgagtgcgcccacggtcaccggctggcggtcaatacgatgtacgcgtttctggaagaagtattctggataatcataggcttcccctgcacgtcctgcggcagtgaaagcgtcaccgcaccggtttcagccgggtcagtcagtacgcgcatcgcgctaatacaggcggtcatcagctgttcgggacgcacaatgcggtcccaatacttgctgacagtgcggaaagcgtcattggtgctgatgctcagatcataactttgttcaatctgctgcaacaccgggtcaggctggcgagaggcaaaaacgtccccggcagcagtaataaaggaatgcggttggcggtggccgttgcagccgcagtcaacatgttcgccgcaccaggtccaacggaagacgtacaggcataaatctgctggcgcagcttttgcttggcgtaaccggttgccgcatgcgccatgccctgctcgttacgcccttgatgaacaatcagttttccgctgtcttgttccagcgcttgcccaagcccagcacgttgccatggccaaaaatagcaaaaataccggtaacaaactttatctcttcaccgtctacttcgacgtattgctgatctaaaaagcggaccagtgcctgcgccatggttaatctgatctttttcatcttccattccttgcggttaacgctgttaccgtggtgatgttttcatcaaaaatgatatgaaaagattataaagattttattgtctagtgaaatgaaaaaaccgaaccaatttttcattttgagacaatcatcataaaaataaaacaaaataatcgtcattcgcctggaaggggaagtgcgcagaagggtaactcaagaaaagggtaatatattaagtaaatgatttaattatgattaatattaaaaacaagagaaagagaatgcgtcacaattttagttttaaaatttcattttaactttaaatgaaatttttgggattttcgaagagtcatgatgacctgagaacaacccgtttaccttgccccggccgcgggcaaggttacctgttaaccgtgggcgatttgggttttgcttttaaagcccaccatgaacagcatgatagccccgaccatcagcaccatatcggccacattaaacacgccagtatgcacaatgcctgcactcacgttcatgaaatcaacgacataaccgccatagacgattcgatcgagcaggttactgatccctcccgagaagatcattgtcagtgagatcacggtgatcgcgtcggctcgtttattcaataaggtatagaccaacagcgccagcaggaaagcccctaggccaataatcatcaacgcatagcgcacattggcgggcaaagtgccgcccaaccccaaaaaggtgcccgtattgtgggtcagcaacagtcgaatactgcccctaaatactcacggacagactccatagacagcgttgcctttgcaattgctttagtaatttgatcaatgccaacacacagggcgaatacgacgactatcagaccgagccgtttagtgaatttcatgaagttcttccagaacaagaaaaggatagccccagtatagccacccgacgcatcaccttccataccgcagcaccgctggcaataggccgtaaccttttaccgaaaaacaacgacacaggctgacaaaaactgaaaaaggtccagcaagagtgtgggggagatcaagaaattaaatatttcgaataaataatatttgaaatttaaatttcgaatggttaaattgaaatcaacggtgaggcctgcttccccatgaaggaaaagggccaagccgtttcacggagggcgtgaagataaaaccattctgtgcggtgatacgttcatcgtctcggcagcggcggcgctcactgccgataccgagattacaccgaagaacgttaacggcgcagggtatgaccctttacaacaaggatgttgtaaaggtcctcattttttcgtcgctgaaccggcaatattacctgcacctttcaacgcgagagacatcatcagggtttgtgccagacacatcgaggctatttgcgagcggaagccgtcaacctgggcttcgcgtacaataaagcagacttcgctgaaggcggtgagcggactgaccagactgtcggtaatcgctatctgttttgctccttgagcggcccccatcgagactaaatcaaccacttcctgcgcgtaaggcgaattgctgattgaaatcaccacgtcggttggccgcaccatgttgagttgctcgttaaacattccgcccagaccgtcaatcaaaaatgtacgacgttccagatggcggaaagcataggtcaaataggccgcaatgctgaaggaacgacggaaaccgatgacgtaaatgttctcggcttcatccagcagtttaaccgcgcgctcaagatcttcggccttaatctgactgctcaactgttgcaacgcctgttcattcaccatgctaaaaactttcaggatttcagccggtgtctccggagcgcccgcatcttcactggccgtttggcgggacagactcgcacgttcggtgtaattgaccgtgccttccatcagatgctgacggaaaacctgtttcatttcgttgaagccgtcaaaaccgtagttattggcaaaacgaatcagcgtggaaggcggtacgtcggctttttcggcgatcgatgcgatagtttcaaaagggatggtgttgccgttatccagaatatagcgggcaacctgtttcagccttttgctcaaagagtcgtagcttgagcgaatttggtcttgcagttgcgcgagttgtgaaggagtcgccataatttttaactgtaccttaagtaaaactatcgtggcagcaagggagtccctctctgcgccatacatataactttcataggcttatcttagcaagtcaccccgcatcagagaaataagtttacccttttcatattgcaacaaataggacgtggatcgggaaatcgtaaaacaatccatgttttacaatcagttgaaatctttcctttgccaaataaagcctattttaaggcagcatgcgcttcagcgtatcgtctttcatgaagtagtgatggaacagcgccgccaacgcgtgcagtgccaccaaatagtagcctatgttcgcgaccagctcgtgggtgtttcttagccctgagcgccactcgggatgcgcgggcaccagctgcggaagctcccaaccgagcagataaatactgcgcccagcaaactgaacggtgagaaaacccagcgtgggtaacgcgagaaacaacaggtaaagcagccagtgcgttagcgtggccacgtgcgcctgccaacgtggcagcggcggcgtgataggcggcgtacgaaaacgatggcgcagcaggatgcgaataaacaccagcacccacacgcttagcccaaagttatagtgcaactgacgcaccagcacgcgatagtcgtcggggaaatagtcacggcccagcatcgcgccataggcaagaacgatcatcagtaacgtcagccagtgcaggctgatttgcagcaaagagtagcgatttttcatcgatttattcccaacgtccataggcattaaaaagtacggcaatatgtttaaaaataatagcgtgaaattaaggggatgcgtggaagcgaggattaacgcctttgtgaaacaaaaaaaaccgggcactcaagacccggtttctatcattcggtcaaacgtgacgctatttcgcgatggattatgcttcgccgcttagtgatttcttttccaatgccgcagcatcgctgctgcttttcttctgcgggatcaggccatctgctcggaacatcgcttttatgcctcgtaccgcctgacgaatacggtcttgattctcgatcaacgcaaagcggacgtgggtatcgccgtaatcgccgaaaccaatacctggcgaaacacagactttagcgtcggccagcagccgtttcgcaaactccaacgaaccaagatgcgcgtaggctggcgggatttttgcccaaacatacatcgatgccttagggttttccaccatccagcccgcctcgtgcaggccacgcaccagcacattacgacgctgacgatactgttcggcgatatctttaacgcactgctggtccccttcgagggccgcgatggccgcaacctgcagcggggtaaaggtgccgtagtcgtgataactcttgatgcgcgccagtgcattcaccagctcttcgttaccgaccatgaaaccaatacgccagccggccatgttgtagcttttagacagggtaaagaattcgaccgcgatgtctttcgcgcccggcacctgcataattgacggtgctttccagccgtcatagacgatgtcagcatacgccaggtcatgaataaccatcacgttgtactgcttggccagcgcgaccacccgttcgaagaagtccagctccacgcactgtgccgtagggttcgaagggaagcccaaaatcatcattttgggacggggaatgctctcttttatcgcacgttcaagctcgccgaagaagtcaacgccttcgaccagcggcacggaacgcacctgcgctccggcgatcactgcgccataaatatgaataggataactagggttcggcaccagcaccgtgtcgccgtggtcaagagtcgccagcatcaggtgagccagaccctctttcgacccaatggtgacaattgcttcgctttcagggtcaatctcaacctgataacgatcggcataccagcgagaaatagcgcgacgaagacgcggaataccgcgagaggtcgaatagccgtgggtgtcttcgcgctgtgcgacggtcaccagtttctcgacaatgtgcggcggcgtagggccatcaggattacccatactgaaatcgataatatcttcgccgcgacgtcgcgcagccattttcaattcagcggtaatgttgaaaacataaggaggaagacgatcaatacgtgtgaaacgacgctttggactggagtcagtcatgattacctcgagtaacgttagcgcccggaccatccgagcgacgctgttctgctgccttggccctaaggggcggccgcagaacgaggaatcaacatatcgcagtgttttaaaactgtcgatagattaaacaaatattttttccagcgccttactgcggcctgcgatcgtttttgagcagccccaacagccagtcattatgccactcgccgtgcagacgataactttcacgcaaggtgccttcgagggcgaatccgcagctttccagcaggcgtcgcgaagcgatatttccttccagaacgttggcctgcagccggtgaaaaccgcactcatcgaaggcgtagttcagcacttcgcgcagcgactccttgccgtagcctttgccctgcgcgtctggcaacagcataaaacccacctccgcctgctgataaggccgccagtccgggaaaaaccctgtcaggccaaccgccctgccggtttcacgttcgcggatcaccagacacagccagaaatcggaatatttatcccatttgcccacccgctgttcgaaacggtggcggatttgcgcggttgtttcaatatcgccgatgtatttcatcacgcccggactctgattgagtttcagaaacaacgaccagtcttcaaacgcgatgggtctcatggtcagccgcggtgtagtcagcaaaatcatgccttttctccctgtgaattaccttgaacggttatccgcaacactttctcaagtacgccataaaatcgccattctagaaagagactggcgcttatttttgataaacgacgctccgtatagcgggcggtagcacatttccctataatcagcagaatcctactgagcgcgatgccaaggcatcccaccgagagtctgctgtgcataacgtttttgatatgacgctggcggtgtttgaccgcgcggcgttgatgctgatctgcctgtttttcttgacccgctcccgccagtttcgccggctgctgcaaaaagacagcgatgcgcataccccctcgaactggccgccgttactgccattttttcgctgttcgccatctttggcacgctgtcgggaattaacgtcgaaggctcgctgattaacgttcgcaccattgctatcgtctcaggcgggatcctctttggccctgggtgggcatcattaccggacttatctcgggcacccaccgttttctgatagatattcatggcgttacctccatcccctgcctgataaccagtattatcgccggatttctctcgggctatatcaatctgcgggtcaaaaagcagcaccactggaaaatgggcattgccgccggcatgctgtgtgaatcgttgaccatggtattgattttgctgatgtcacgccctttctcgctcgggctggatatcgtgatgattatttctgcgccgctgatcctcgggccatttccatcggccccattgtgctgctggtgcaaagcgtggccgacgaaaaagaggcgattgccgcccgacaggcgaggctggcgctggatatcgccaacaaaacgctgccctatttccgcaatattaacgccgaatcgatggcgactgtctgcaatatcattcgtgaagacatcaatgccgacgccgtggcaattaccgacaccaagaacattctcgcctacgtgggcaccggtgcagatcaatacaatattggccatgagatcattagcgaaaataccaaagaagcgatcagcagcgggcggatcactatcaagaataacgatgaaatggatagaacgccgcagatccactcacaaatgatcattccgctgtgggaaaaaggcgtcataaccggctcgcttaagatctactattgccacgcacaccgcatcacctattcgttgaaggtcatggcggtcggtctgtcgcagattatctccacgcagatggaagtatcacgcgccgaacaactgcgtgaaatggccaacaaagccgagatgcgcgccctgcaaagcaagataaacccccatttcctgtttaacgcactgaacgcgatttcgtcgtcgattcgcatcaatccggacacctcgcgacagctgatcattaatctgtcgcgctacctgcgctacaatctcgaattaaacgacgagcttattgatttgcgaaaagagctgcatcaggtgcaggactatatcgcgatcgaaaaggcgcgatttggcagcaaactgacggtaatttacgacattgacgacgatatctcggtgtctatacctagcctgcttattcagccgctggtagaaaacgccatcgtccacggcattcagccttgcagcgggaaaggcgtggtagtgattgccgttaagcgcctcggtagcaaaattaaagtgtcggttaaagacaccgggcaaggcattttgcagtcggtaattgaccgagtggcgaataacgagatgccggggaataaaatcggtctgctcaacgttcatcaccgcgtcagtctgctttacgggcaaggcctgcagatccgtcgcctcgaaccggggacggaaatctcatttttcatacaccaggatgataaacgcccgtgaaagctatcattgtcgaggatgaattcctggctcaggaagagctcagctatctgataaagacccacagcggcattgagatcgtcgacaagttcgacgacgggttggaagtgctgaaatatcttcagaatcatcaggttgatgccattttcctggatatcaatattccttcactcgacggcgtgctactggcgcagaacatcagcaagttcgcgcacaagccgtacattatcttcatcaccgcttataaagaacatgccgccgaagcctttgaaattgaagcctttgactacatactcaagccctatcacgagtcgcgcatcgtcaccatgctgcaaaagctcgagacccatttcaagcgcgacaggcaggccgatacgcctgccgctactggcagcaaccgcgtcagccacagcattaatcttatcaaagacgagcggattatcgtgaccgatatcaacgatatctattacgcggccgcgcaggaaaaagtgacccaggtgtacacccggcgagaagaattcaccatgccgatgaatatttcggagctgtgcaatcgcctgccggcagagcatttcttccgctgccatcgctcttactgcgtgaatttgtcgaaaatccgcgaaatcgtgccctggttcaacaacacctacattctgcgcctgagcgacctcgactttgaggtgccggtcagccgcagcagggttaaggccttccgccagctcatgggcctataaacaatttcgcctccgcggccagagggctgaggaggcgaaattggaatcggctggcgattgcggtcttaggcgacgagcgtaatacccatcgactggcgcaggtaagcccctgaacccaacaggccaggctgatcgtgagtaatcagatatactggaatatcaaccagatagtctttaaaacgccctttatcttcgaaggcggcgcggaagccggaagccttgaagaactccaggaaacgaggcacgatgccgcccgcgatataaaccccaccgaaagtgcccatggtcagcgccagattgcccccgaagcggcccataatgacgcagaacagtgacagtgcgcgacggcagtcaaggttgtcttccagcgccagcttggtaacgtcttttggcgcgtagtcttctggctcgcggttgtcagacttgacgatagcgcggtacagattgaccagacctggacccgaaagaatacgctcggcagaaacgtggcccatctcggtgcgtagctgctccagaatgatatcttcttcttcgctgtttggtgcgaaatcgacgtgtccgccctcacccggcagacttaaccagcgattgtcgacgtgaataatgtgcgccacgcccagaccggtccccgcaccgtagataacagccggtttaccgtcctgcggttttttaccgccaaactgcaacaggtccacttctttcagcattgggatagccatggaaacagcggtgaaatcattaatgacttcaagatggtccagccccaggtttgccttcatctcggcaatcgagaatttccaggtgtggttggtcatcgcaacccaatcacccacgataggacaggcgatggcaatacacgcatctttcacttcctgatgctgctgcagctccagataatgacgaactgccgcttcgagactgtcgtaatccaggccggaaaaagtctgggcctgagagatctcaccgctgtccagagcgcaaagcgccagacggcagttagtgcctccaacatcgcccaccagggagtacttggtcatttttatctccgcaaaaattaaattgcttgccctgcttcagctcgcattcagtgatgatactcggccttttcagacatgcccgattgtgggctggaaaatctaggccagcaggactataagtgctaagtgcttacatattcgtgagggcaaaatagcggtaattgccctatgctgcaacgccgatttaacctattgatgatataagcagcggcataccgcaaaataaagcggtaaaaaacaaaaattcgacgatcctctatacattggacagagcagaataataagggaattcttgcatgttgcatcctcgtgccaagaccatgttgaccttcggcgttccggccctgctgattggcgctgcttccggtattattctggtcgccgtcatgcgttttgccaatgcgctgcaaagcctgttttggctgcatattcccgacgcgctaaagattaacacgctatccgcaggatgggtgttgtttatactcacattaaccggtatagccgtcggcgcgctgattcgttcgatgccgggccatgccgggcctgaccccgccaccgagtcgctgattggcatgccggtgccgctggtcgccataccgggcctgctgctggcattggtcatcggccttgcgggcggcgtcagccttgggccagaaaaccctatcatcgcaataaacatagccgtcgccgtgacagtgggcacgcaccttttccctcgcgtgccgactacagactggataattctcgccgccgcaggcacgctcggtgctttgtttggtaccccgattgccgccgcgctaatcttctctcagaccctcaacggcggaaaagacgtctcgctgtgggacagactgttcgcccccttgctcgccgccggtgccggtgcgctaaccagcaatctgttttatgaacccgactttgcactcaacctggcaccctatgccgagacgcatttcatcgacattatcagcggttcggtagtggtgatgatagccatcgcactgggcatgttggcggtatggtgtttcccacacgtgcaccgcgcgttccatgcaatccctaatcctgttgttatgctcggtattggcggattcgcgctcggcctgctggcgctgattggcgggcagattacgctatttcgcggttacgatgagatgaaactgctggcgataagcagtgccagcctgtcgctgggccaactgcttgctatcacgctgagcaagctggcggcgctggtcgtggcggcggcctgtggattcagaggagggaggattttcccggcggtgtttatcggcgtttcattgggtgttttgctgcataatcacgtggattcggtgccggcggcggtgaccgtgtcctgtgcggtaatgggaatggtgctggtggtcacgcgcgacggttggctgagcctgtttctggcgattgccgtggtgccggacctcaagctgctgccggtgctgtgcatcgtcatgctgcccgcgtggctagtgctggccggaaaacctttgatgctggttatccggcacgacagaagctcagaaaccgaccgcgaataagctcgggcgctagctcaatgagaacgcgacggcggcctgcgcatgaatcgcggttgtatcaaagaccggcacgcgggcgtcgtcggcaccgaccagaagcgtaatctcggtacaaccgagaataatgccctctgcgccccgcagctccagcgaacgaataatgcgccggtattcctcacgcgaggcctcaagaaccttaccgaggcacagttcttcataaataatacgatgcacgacggcgcggtcggcctcatcaggcgtgataacctcgatgcccagcgcctcaagccgcccgcgataaaacgcctgctccatagtgaaacgggtacccagcaggccaatgcggcgcagcttttgcgccagaatcggccgcgcggtggcatcggcgatgtgcagcagcggcagtccgccgatattctctatcgcctcggcaaccttgtgcatggtgttggtacagagcacaatcacctcggcaccggcattattgagcgccagcgccgctgcaccgagcacttccccggctttctcccagttgccctgcgcctgcagttgttcaatttcatagaaatcaacgccatatagcaccagcctggcggaatgaaggccgcccaactgctgcttgatttgctcattgattgctttgtaataaggaaccgtcgattcccaactcatgccgccaatcaggcccagagttttcatttggatctcctcgcatccttgttgttcatcgaaaatagaggaacaccagggcgataacaagactcgggcgtgctgaaattaacgtcttagcggctctctcgcctgatttctcttacgcgacatcacgcgctgacgcagcgtatcgtacagccagttatagccgatggtataaggcaagaaaaacaggaagaaacccagttccagaacgaaggcgtctatcaggctgatttgcagccaccaggccgcgatcggcaggcctataagaataaagccccctcaaaacccagcgcgtgccctacgcggagcggaaaagtacgcttcacgctgcccataggccagaaatagtcgaaaacgctgttatacaccacgttccagaccatcgcggtggtagagagtaaaatcgacaatacgcccatctcgaggacaggtttattcattatccatgccgcgacagggcgcagataagcagcgccatcacctcgaagccgacggcgtgaatgagccgctcagtgagacttttttgcgccttcattgatgcgtttaacgatgacatagtgtttacctttaataatcctgatggtgtccgtgacccttccttgtcctaaggagcaggattatcatcgctaataaagatagaataaagttagctagtatcgataaaaccgatacatcaccgttacctcagattgggaatgcatcaatgcgctattcacccgaagcgttactggcttttgtcgagaccgccgccagcggatccttttctgccgccgcgcgtaaactgcataaaagtcagtcaacggtcagcaccgccgtggcaaatcttgaggttgatttgggcattacgctattcaaccgcgagggccgtcaaccgcagctgacgccacagggtcagaaggtgctggcccacgtacatgccattttgtcggccagcgaaaaactcgatgaactggcggtgcggttgtcggcgcaaatcgagccgcgcctgacctttgtgctttcggatacctatcaaccgacccattacgagacgctgctgagccacttcgaacagcgctatcccgacatcgagtttgaatgcctgattgccgaagaccgcgacgtgattgacctgttgcagctcgggcgcgcgcatatcggcatgcttgaagtacaggagagttatccgccggatattggctatgcgcgtctgcccgaccagaccgagatggcgctgtttgtcgccaaaaaacacccgctggcctcaattgatgcgctgcgccatgaagatttgcccgcctatcggcagctttgcctgcaaacctacggcaggcagacgcagcagaaagcccttggacagacctggtctgcgccgagctatctgatgctgctggagatggcggaacagggatttggctggtcgatactgccacgctggctggtggcgcagttcggccacaacaaactggtagagctcagtctctcgggatggccaaagatgatttctatcgatgcggtctggtcgcgcaacaatcagccgggaccggcaggccgctggtttatcgacagcctgctcgacccgttgcgtatcgaggggcagtaaccgcccctcatgagcgatgggcgacggctattcgcgtgaagaattatgcgcttcgagcgcacgggtaacggcgctcagtagcggcggaacgtccattttcggcagcactacctcaacccaacacagctgagggcgggcgtctatcttcgccatcacctgtcgcagttcactcacgtcggttacacgttccaccagcgtcggttctgtcgcgccaaacgcctgcggcagtaaagtccactgccattgggcaatatcgttgtagcgttgttcagcgccatgaattgcccgctcaaccgtgtagccatcgttgttaataatgaagatgacggaattgagccgataacggatagccgcacctagcgcctgcacggtaagttgcgctgagccatcaccgattatcaatacgacgcgcctgtcgggattggctatctgcgcgcccaacgccgcaggcagcgtaaagcctatcgagccccacagcggctgggcaataaagtcacagccttcaggcaagttcagctgcgccgcaccgaaacaggcggttccctgctcgaccaccagaatatcaccgggttgcaggaaggtctgaatctcttgccagaaggcctgctgacacaagcccgtttcggttggcgcaggcagggttttgtcaggaatagccgcgggcttccagaatccggccagttcggcggtcaggcgatgcagaatatcgacgcttaccgacagcgggacgtggctaaatacctgctcccctacctgggcgctgaacggctggagatcgatacgtttatgctgcgcaatattttgcgtaaagccgctggtcaccgtgtcagagaagcacacgccgagagtaatgacggcatcggcatcctcaatgacgctgcgcagcggctcgccgctggccttccctgcgtaggtgccacagaaggtcgcacggcgctcgttcaataatcctttcccgagcagcagcgtggcgtgcggcagcggaacgtcgtccacccattgctgtaccgcgtcacgcacctcaaaacgatcggccagaaagtcggctaacagactcacgctgtcggccgagcgcaacaacgcagtcgccgcgcgggtgaaagcctcgacagaatttttgtccacggcaggcaggcgagattcaagaggccgagtgggggcggaaacctgatgagaagctacgtcggttggcagttgaatgtacaccggacgccgcgcatacagcgcctcgcctaacactctgtctatctcctgcgtggcattttcgggagtaagcagtgcctgcgccacggttatctgggcggacatacggggaaaatggctgaaatcgccgtcgccgagcgagtggtgcagcagttcatggcgcttctgcgcgttgagggcgggtgcacccacaatatgaataacgggaacatattccgcatagctgccggcaataccgttcaacgcgctgagttcgccgacgccaaaggtggtgagcagtgcggcggcaggtttgctgcgcccgtaaccgtcggccccgtaggcggcattaagctcgttggagcagccgacccatttcagcctgggatgagcgataacgctgtcaaggaactgtaaattatagtcacccggcacaccaaataattcatcaatgcccaactcagaaagtcgctcaacgagatagtcacctacgctgaaaatatgactcatgatgatctcctattaaatattgaactgctagttaatagttctagcacagtgtccccgagtacaaatgagtcaaagaattattattcaaatggtgaatggaaagcggcaaagacagtcggcgtaaaaatgccgttttttagtgcaatgccttcaatctcctaagagttttcctttgttctaaaaaaagagtagccgatgtgatcgcgacatctgaatatagaagtgaaaacgcatacactaaaacgctattttactaacggtaacttttaaacaaggatccctatgccttatcaagccaaccccgcccgatatgaaacgatgctttatcgtcgctgtggtcacagcggcctaaaacttcccgctgtctcgctaggcctgtggcacaactttggtgatacatcgcgcttcgaaactggccgcgaactggttcgtcacgcctttgaccaagggataacgcatttcgatttagcaaataactatgggcctccgccgggatcggccgaagagaatttcgggcgtattctgcgtgaagatttattgccatggcgcgatgagctgatcatctcctccaaggcaggctacaccatgtgggacggcccttacggcgactgggggtcgaaaaaatatctggttgccagcctcaatcagagccttaaacgcctgggcgtcgagtacgttgacattttttatcatcaccgtcccgatccgcatacgccgctggaagagacgatgtccgcgctggatttgatcgtgcgtcagggcaaggcgttgtacgttgggctgtcgaactacccggcggatctggcgcaaaaggcttttgatattcttaataaactgggcacccctgcctcattcatcagccaaaatattccatgtttgagcgctgggtagaaggcggactgctggataccctgcaacaaaacggcgtaggctcgattgccttctcaccgctggcgggcggcgtgctgactgaccgttatctggcgggaattcccgaagattcgcgcgccgccagcggcagcaaattcttgaatccggagcagataacgcctgaaaaactggagaaggtgcgcaagctgaatgagatagctcaggctcgcggacagaagctttcgcagatggcgctcgcctgggtgctgcgcggcgacagggtgacctcagtgttgatcggggccagtaaaaccagccagattgatgacgcagtgaacagtttgagcaatcttgaattgagcgtacaggaaatagcggcgattgaagacatcctagtgtaaccgcttacctcaaacgggaaaactttgttaacaatgctctcagggacttactgtaagtatatcgttaaactgggtaaaagaatcaaaacaggattgcagacaatagaaagcctgccgtccaggccttataactgtcattattgaaaacgttatctaacgaattaatgcaaacccaattattttatgtcgcggctttatcgttacagcatgaaacaagtgggaataaggttgaatggagaaacatgatgaaaaaattacccgttgtaaagattgctctgggtgccctgctgttcggcctgttgccagccactatgcctgcacacgctgacggtatcagcatcaatgttcctggcttgtctatcagcatcggccagcgtgataaccgcggttattactgggacggttatgattggcgttctccgtactggtggcaacaccgtaacgaatactatggtcaccgcaacgatcgcggttactactgggacggcgctcgctggcgtgatggcggctggtggaaccagcacggtcgcggccacggcggcccgggccctcgtcctgaattccacggcggtcctgaccacggtcgcggcggtcccgatcacggccatgacggcggcggtcgcggcgaccacggtggtggcgatcacggccatggtggtgatcacggcggcggccagcctcgtcctcctatgggcggtccaggcggcgaccaccattaatctccctgaacaaggggcactgaaaagtgcccctttttttatccgatcattttggctaaaaatgctactttttacccaaaggttaaaccttattaatgctttaataattttgtaaaaaatcagaattagagtccctcacttttataagcccataaaaatgaggtagaacatgaagttaaagcttgccgtcgctatttccctactctgcacacctgccctgaacgcctatgcttccgatgtcaccattacgacgccgatactcagctcgatggataactttcgtgatattgcgggcaccaccacggcctacagcaccacttacggcggcaccatgcgcagcggcgtcttttatcgttcgaacgtcttcacgccgtcggctgccgatctggctactctcgaaacgctgggcatcacccatatttacgacctgcgcaccagcagcgaaatcgccgccacgccggatactgttccgtccaatataacctacaccaacatcaatatccttggcgatagcagctcggccgcgacggcaagctcttcctcgacctctgccgccagcctgttgactagcctcggctcggccagcggagccgaacaatatatggatgaaacttataaagagtttgtggatgacaaaaacgtcagcagcgagtttggcgtgctgctcaatgacctcgccagcaccaaaggcgcggcgctgttccactgcacggcaggcaaagaccgcaccggctgggcgactgccatattgcaaagcattgccggcgtaagcacccgcgacatttatcaagattatctggcgaccaacacctataccgccgcccgtatcaatgcggaactggccgcgatgcccgccgccgaagccgccatctacgcgccgcttctcaccgtagaagccagctatctcaccacggcatttgatgaagtgattgcagaatacggctcaatgcaaaactatttgaccgagggcctgggtctttcgcaggccacgatttatgtgctgcgcgccaagatggtgctctactcaacgctgccgggacaggcgggaatgcgtggcaacgacgccgaaggtgcggagctgcttaacgaactgcaaaacagcagtctttctggtgcttacactaactataactactatttgcagtcggcaatcgatgccggaacgctgggcggcgtgcagtcgaccgtcggcggtcaggtctatgccgatacttcaagctaccttcttcgtcaaaactcgctgctcgacgatgcgcttgcgccttataccgacagttcgcgcatgaaagacggcgaaagcaacctgtgggcaaccgcgctttccggctatctcggcacaggaggatccgcacaggcctccagcagcaacgaacacagtacaggcgtgatgatggggctgggtcagcgcttcaacagtcgcgtcagcggctacggtacctttggctatgaccggggatcggtcggcgcggcgggcggtgaggtgaaaaccaatctaacctttgtgggcgcgggcggacgactggcgttcaacaaccttgatgccggagccttcttagccgcggacgtcaacgccggatggataaatgacaacggtaaacgccagctgggcggcggtctgggcaccgcatggggcgacaccgaaggtcagttggtcggcggcacgctgcgtctgggctatgctagtgaccttgggtgggtccgcgtggaaccttccgtaggaggacgtgtgtcgtatctcaaactcgacgccttccaagagcgcggcagcgaacttgcgctggacatgaaccgcacaagcgaaaccagcacccgcggcgtcgctaacctcaagttcgccttccgtccttcagaggcaggcaactgggctatcacccctgcggttaacctcggctatgagcacgacttcagtaatccgacggtcagcagcagcggtgaactttacggctacagcgtgacacaggattcgtcttatcacagccacaacttctacactgccggattgaacgttatcgccagccacggcccgatcagtcttggcgcacaggttgccgcgctgggatcgggcgacaccaaaggggtcagcggcagtctgaatctcagctacatattttgattatggttaaacagcatgcaaaaaggggcacttttcagtgccccttttttagtgtttacctgaataatcgccgcgctacttcagcatgccgatcagcaaatagaagttcagactcactaccaccagcacaatcacccgcccagaccactgcatcagccttgagttggtcatgtctcccatcagctcgcgattgccggtaaaagccagcagcggtaacagcgccagcgcgataccaaaactcagcaatacctgactcaagaccagaatcctggtcgcatccatgccaagcagaatcacgataaacgatggcgccatggtgaccgcgcggcgcacccacagcggaatgtaaaacttcacgaagccctgcatcaccacctgccctgccagcgtaccgacgaccgtggaggacaaccctgcagcgaccagactcaggccaaacgtcgttgccgccgcatgacccagcagcggcgtcagcgtcaggtaggcttcctccagttcgctaatgcccttgtgaccactaaagtggaaagccgccgctgccgtcgccatcatcgccagattaacgaaaccggcaatagtcatggcgatcgccacgtccagcttagtcgaagaataacgctgctctttcgagtctttggacgaacgctgagtcagcgatgagtgcagataaattacgtgcggcataatggtcgcgcccagtaccccggcagcgaggtaaacggaattactgtccggcaggctcggtgtcagcatgcccttgccaagcgccagcattttaggctgcgagaagaacagctcgacgatatacgccagcgccacaaacagcagcaggccgccaatcaccagctcaagcggtttttgcccgcgtttttgcaggccaagaataataaaggtcgctatccccgtgagcaccgccccttgcagcagggagacgcctaaaagcagtttgaagccgattgccgcaccgataaactcggccaaatcggtagccatggcgataatttcagcctggacccaataggcccagaccgcaggacgtgggaagcgatcgcgaatgtgttctgccaggtttttaccggtggcaatacccagtttggcggacataagctgaatgagcatagccatcacgtttgcccagacaacaacccaaagcagctggtagccgtaggaggcacccgcctgaatgttggtggcgaaattaccgggatcgatgtagccaatggcggcgatgaaagcaggccccattaacgaaagctttatcttcctggaagaacggctggaggattcagctcggctattcaacatatcagttaacccttacagtttttacgctttctaatactaatataataatcaattgagaatgattatcaagtgcatttagagaggtgttgtttattgctctgacaggaagcaagaagcgtaagaaccggcaggttttatgtgctagatgccaaaagactcaatgatggctcgctttccgaatacagaatttttagaatactctggactcaaccccacggaaacgctgggtgtattactgccagtattaaagctagcacaaaaaatccaataatgcgtagtttacttaacatcttgacttttcgtgttatgtcgctggaaatgttgcttttttttggcttaattcctatatttgcaatacatatcacattttttgtgtacgcgttacataaaatgaccgtcgaaatattgcctgcctcaaatttggagcaaacatgtcccgaatactgcactttgttttagcgttagccgttgtcgcagtactggccttactggtgagccgtgatcgcaaaaacattcgttttcgcttcattgttcagctattggtcattgaagtcttattagcctatttcttccttaattcagaaattggattaggtttcgtaaaaggcttttcagacttgtttgaaacattattaaaattcgcagcagaagggacgggtttcgtatttggaggcatgaacgaaaaaggattggcgttcttcttcctcaatgtgctgtgcccaatcgtgttcatttcggcgctgattggtattttgcagcacgtgcgtatcctgccggtgttcatccgcatcatcggtactattttgtctaaaatcaacggcatgggaaaactggaatcctttaacgccgtcagctcgcttatcctggggcaatcagaaaactttatcgcgtataaagatattctgggcaaaatgtctgaaaaacgcatgtacaccatggcagcgaccgccatgtcgacggtttcaatgtcgatcgttggcgcttacatgaccatgctggaacccaagtacgttgttgccgcgctgatcctcaacatgttcagcaccttcattgtactgtcgctgattaacccttataaggttgatggcgaggaagatctgcagctgaccaatacccacgcagggcagagcttttttgaaatgctgggtgaatacattctggcaggtttcaaagtagcgattatcgttgcggcgatgctgattggctttatcgcgctgatctcctgcctcaatgctctgttcagcgcggtgttccacatcagcttccagggcgtgttgggttacgtgttctatccattcgcatggattatgggcgtgccaagcagtgaagcactgcaggtggggagcatcatggcgaccaaactggtttctaacgagtttgttgctatgctcgatctgcagaaagtcgcacacgacctgtcgccacgcggtgtgggtatcctgtcggtcttcctggtgtcttttgctaacttctcgtcaatcggtatcgtggcgggggctatcaaaggcctgaacgagcaacagggtaacgtggtttcacgcttcggcctgaagctgctgtacggttcaacgctggtgagcgtactgtctgcatctatcgcgggtctggtactggcgtaacgtcgcaacaaaagcggtttaagaaggcgcttcggcgcctttttttgtgcccgtcgttcaggctacaaggcgggttttctggaaacagaaagcaaaaaacccgccgaagcgggttcttttaattttggtggagataagcgggatcgaaccgctgacctcttgcatgccatgcaagcgctctcccagctgagctatacccccacgggtgttctgatttactgtcttatgcctacatcttggggagatgtaaacgaccaacctgctctgagaagaagattggtggagataagcgggatcgaaccgctgacctcttgcatgccatgcaagcgctctcccagctgagctatacccccgttccagacacattaaatcttgtgaacggggcgcataatatgaaaccccgccaaggctgtcaacggctaaatgtgattatgtaatcaagcgctgaaaaagccgccaaataccggccacgaaagcgatttttaaccctgagcggacacattatgttcgtttcatgaccttcttatcttcccgttgaaaaataggaaaaaggctgggccgccgagcgcgcgcgaaaaaaattccacaggcttattaatgctttcattaaccaaccgttaacaaggttaaaaacgcatcttgtcctcggagaattctcataatagacttctattgcattatcaggtttctctatccttaagaatttttctctataaccattctattcgagcaaactcatgtccttgtatgcaccaaaagaaatcgcttcactcgccgttgcggccggagtgagcaaaagccgtgcgtccgtcgccaatttattaatcctgggttttcttgcgggtgcctttattgctatcggcttcctgcttgacctgcatgtagtagggacactgcctgcatcctggggttcttttggcggtctgctcggcgcagcggtattcccggttgggcttatcctgaccgtgctggccggcggtgaactgctgaccggtaatatgatgaccttgccaatggcctggttcgcccgtcaaatcagcctgtttgccgtcgtgcgcaactggttctgggtcactattgccaacctcatcggcagcatcgcggtggcctacttctttggtcacgtgctgggcatgactgaaggcgtattcctggcgaaaaccgtggcgactgcccaggcgaaggttaacgcagactttatgcactcctttatttccggtatcggctgtaactggctggtatgtctggcggtatggctggcatttgccagtaaagagatgggcgggaaagtcatcggaatgtggttcccggtaatggcgttcgtcgctatcggcttccagcacgtcgtcgccaacatgtttatcattccggctgccatctttgcgggtgcgctgagctggtcgcagtacctccctaacttcgttgccgtgttcctcggtaacgcggtcggtggcgctggcttcgtaggcctgatgtactatctggcgtatcgcccaacggcggcgtctgccgagtcgacctcacagtctcgttaattcgttttagcaggctatagataaaagaaaggccagtcggagcatccggctggcctttttgttgttcaaccctcaggtctattaacgcttattgctgtgcttcacgctcggcgatataggccagcgcttgatcgatacgagacaaagtgcggctttgaccaatagcgtgcacggtcacgtccatgcccggagacatgccggcaccggtcacggcaacgcgcagtggcatgcccactttacccatgccaacgcccagctcgtcggcagtgccctgaatggcgttgtgcacgttctcaggcgtccagtcggtgatggcagccaggttggcacgcacggcttcaagcggctgacgcgcaaccggacgcaggtgtttcttcgccgctgcgtcgtcgaactcactgaagtcctggtagaaatagtggcaagactcggccatctctttcaacgttttacaacgctcacccagcagtttcaccagcgcagacagctccgggccattgcgggtgtcgatgttctgctgctcgatgtgccattgcagttgcgtagccacatattctggcggcagtgcgttgatgtaatggtggttcagccacagcagcttttcggtattaaaggcgctggcagacttgctgacgctgtccagactaaacagcgctttcatttcgtcaatgctgaagatttcctgatcgccgtgagaccagcccagacgcaccagatagttcagcagcgcttctggcaggtagccgtcgtcgcgatactgcatcacgcccactgcgccatgacgttttgacaactttttaccgtcgtcgcccagaatcatggaaacatgcgcataaacgggtaccggcgcacccagcgcttttagaatgtttatctgacgtggggtattattgatatggtcttcaccacgaataacgtgagtgatttccatatcccagtcatcgacgacaacgcagaagttataggttggggcaccgtcggtacggcggatgatcagatcgtcaagctcaaggttgctaaattcgatcggaccacggatctggtcgtcgaaaataaccgatccttcctgcgggttgcggaaacgcacaacgcaaggctcgtctgcggcgtgatgttcatgactgtcgcggcagcgcccgtcgtagcgaggcttctcgttgttggccatttgctcttcacgcagcgcttccagacgttctttggagcagtagcatttataggccgtgccattttccagcatttcatcaataaccgcattgtagcgatcgaaacgcttggtctggaaatatggaccctcatcccagtccaggttcagccagttcatgccatccataatcgcgtcaatggccgcctgggttgaacgctccagatcggtatcctctatacgtaacacaaactcgccgcccaggttacgagcataaagccaggagtaaagtgctgtacgagcgccgccaacgtgcagatagccagttgggctgggagcaaaacgggttttgattttcatcagggaagcagccttaactatgtttcaaatagatgtcgcgactaaacgagactctcatttatacgacaaccaaagttgttgattagaaaactatggttgtaaaagtggctgtcattctatcactctgcctcgaatcctcaacgttgaacccggcaattgaatgggtaattgaacggatagagaaagaaaaacggtcataccgcccctctctgctttatgtttcaagaaaaaatagcgtttcaggaggacgatttcctcaaaaaagtggattccacaaggggagtttctttaaaacagagcctggggtctggtaaaaagcggttaactccccaaaaacgttaatggcctttcgcaggaaaaacgctatttttagctcgttgatgcataagaactagtctgcactgcatacttttttggcgtcttgtctagttttgcgccgaacagtcatttttgtttttaaaaaccgttgactcaattcgaactatccctataatgcgactccatcacgacgggggcgattagctcagttggtagagcatctcctttacacggaggggtcggcggttcgagcccgtcatcgcccaccactctttaagagtgaccgcgttgtgataagccatcttatgatgggcgattagctcagttggtagagcatctcctttacacggagggggtcggcggttcgagcccgtcatcgcccaccactctttaatgagtgatggtgcagtaagaagaaatgagaaatgggcgattagctcagttggtagagcatctcctttacacggagggggtcggcggttcgagcccgtcatcgcccaccatttctcagcaagcttcttacgaaacagttttcagaagtgggcgattagctcagttggtagagcatctcctttacacggagggggtcggcggttcgagcccgtcatcgcccaccacttctggcaaactgaacaagcagtaaagacagttactaaacagtgggtcgttagctcagttggtagagcagttgacttttaatcaattggtcgcaggttcgaatcccgcacgacccaccacttagtaagaaaaaagcgcctaaagggcgttttttgcgttttagcgccactgaataatttaccgactctatacgagcagattccgctgggagtgtgggtgagaagctgcgttcaggttcgagccgagcgaagcgagacgacaacgcgaacgcgttgcccgcagggtgaggccaaaggccgaatcaatcccgcacgacccaccacttagtaagaaaaaagcgcctaacgggcgttttttgcgttttagcgccactgaataatttaccgactctatacgagcagattccgctgggagtgtgggtgagaagctgcgttcaggttcgagccgagcgaagcgagacgacaacgcgaacgcgttgcccgcagggagaggccaaaagccgaatcaatcccgcacgacccaccacttagtaagaaaaaagcgcctaacgggcgttttttgcgttttagcgccactgaataattatacgtgtcgccgctcgtgttttaagtgctttccagtgacacgaagcgtggcgtaggccgcgccgctctgcggtcccttctctttgctcgaaagccaaacgcgtctttctccctccgctcagcgccgtcctggatccgccaatgtgaatccgccatagaaaagacataaaatttaccgttgctgatgcagcaaagaacaaacaaaaaaatcccgccgttagaccgagcgtggatttgaccgcaaggttgccggtttttgtttagaagctggttggcggattcggggcggcgcgggaccacgccacgtgcgcaagcatctggaacaaactcatcggctggcaagacacatgcaccgataacaaggcgtggggttccaaggggccttggcctgggaaggccccttgactggtctgggccagcgcccagcgcgcaaggcgcgtgcccttgacctaaaaaacccccattagcgattaaagatccaccactataccgctttactaaaccggtttactttgttatcaacctagtatcagccattcatccggggagagtaacatgagcaaacgcgtgctgttgttaggtgaaagctgggtcagttcggcgacccattacaaaggattcgatcagtttggcagcgtgacatttcatttaggtgccgaaccactggtcaaagcgctcgaaaataccgaatttgagctcacctatatgcccgcccatgaagttgtcgagaaactgccgttcgatctcgagggactaaaagcctttgatgcgattattctgtcagatattggcgctaattccctgctcctgccccagccgtgtggatgcacagcaaaccgatgcccaatcgcctcaaactactacgtcagtggaccgcagaaggcggtggcctaatgatgatcggcggttacttctcgtttcaggggatcgatggcaaggcgcgctggcgcaatacgccggtcgaagaagcgttgccggtcacctgcctgccctacgacgatcgtctggagatcccggaaggattctcggcgaagatcactgcgccaaaggatcatcctgtcctgcaaggcatcgacggtaaatggccgctgctgctcggcgctaatgaggttgtgctcaaagaaggtgctgaagtgctggctaccctacccgatgacgaaggtgggcacccactgctcgtgagcggcacttacggcgagggccgctcactggtctggacctctgacatcggcccgcactgggtaccaggtgaatttattcagtggccgggttatgaccagctgtggaaaaactgtctgggctggcttacccgcctcaagtaaccctcacagtgaagtaagggggaaagtcagttgatgaaaacgactttcccctgcaaagccggattatcgctctcatctttgagattcactcctgaaagctgacggtgaaacgcctgctccaataaccacgcgagtttgaacgcagcctgcgggtagtccagcccttcgggacgaacattagagatgcagtttctctccgactccctccgccgcgtatgcggtccccaggtcatgtaaatacccaggctgtcgggcgacgacagaccaggacgttcaccaatcaaaatcgccaccgccctcgccttcatcacttccgcaatatcatcacccagcgccacccgtgactggtgcgctaacaccaccggccccaggctcagccccagcggtgacaaatacggtaacagcgctttgatgaggggcaccgcctgccgatgtaccgccttagacgacagcccatcggcgacgaccagcaccagatcggcgggattttccggcaatgactgcaaaaactcgcggctggcaggcgaaagcttgcggccgagatcggggcgacaaagataggtggtgcgatccgacgcggcgctgtcgacacgtaatgttttaaggcccaacgcctgcaattcaggctccaactcctcgctgttaaaaggctgatgcacagcgtcacgcgcctgcgcatgcgccatgccaaaacgcagcacctcatcggttggcaggctcgcaccggaccgcccgagcgcaattcttgccgccgtaaacttgcgcagcgcctcccagggattcggatgtaccagctgaagcgcctgtttatcttctttactcatggtcatcctcccagctgcggcagctggctcagcaatgggtgcgatgcgcgggtatcgcatagcctgccggcaccatcgattatcttcattttttccagccataccgcgaattccggggcatgtttaaggcctagcagttcacggatgtagagcgcatcgtgaaatgaggtgctctgatagttgagcataatgtcgtcggcgcccggcacgccaatcaggaaggttaatccagcggtgccaagcagagtgagcagcgtgtccatatcgtcctgatccgcttcagcatggttggtgtagcacacgtcacagccaagcggtacgccaagcagcttgccgcagaagtggtcctccagtccggcacgaataatctgcttgccgtcatagagatattctggcccgataaaacccaccaccgtgttaaccagcagcggtgaaaagcgacgggcaatggcataggcgcgcgcctcgcaggtctgctgatccacgccaaagtgcgcattggccgacagacagctgccttgcccggtctcgaagtacatcacgttgtcgcccaccgtaccgcgtttgaggctgagcgctgcctgctgggcctcttcgagtatggccaaattgatgccgaagccgctgttagccgcctcgctgcccgcaatcgactggaataccaaatctaccggtgcaccccgctccaccagcctaatcgtgttagtgacgtgcgtgaggatgcacgactgagtcgggatctcgaaacgactaatgacgtcatcgagcatgtagttgaggttctcgagcagcggcaggctgtcgctggccggattaatgccgatcaccgcatcgccggagccataaagcagaccgtcgagcatgctggccgcgatgccctgtaaattatcggtcggatgattcggttgcaggcgcacgctcatgtgtcccggcaggccgatagtattgcgaaaacgggtgatgacccgacactttttggcgaccagaatcaggtcctgattgcgcatcaacttgctgacggcggcggccatttctggcgtgatgcctttggcaacccgtgccagcaccaccgagtcggtcgtctcactcagcaaccagtcgcgaaagtcgcccacagtcagatgcgatatctcggcaaacgcggcggcgtcgtggctgtcgatgattagccgcgtcacctcatcgtcttcgtagggaatcagtacctgctgcaaaaatactttcagcggcagcgcggccagcgccattttcgccgccatgcgctcctcggcgctttcggcggcgacttcggccagatagtcaccggaccgcgccggtgaagccttcgccatcagctcacgtaaatcgcggaaccgatagcttcgatgacttaatgtcgtctggtacataacactccctggaaagaccgttatttaccgcttttcaccggagccggtttcagccctctgagctgcgggtcactctctgcgttactgcgcgcctgatgggtgagacgaaaccaggcgtaggccagcaacatcatggcggcaaaaatcaaaaacagtaaggtgttgtagtagatcatagctgccagacaaacgatcgccagaaccagcgccagcgcgggtgcaaagggataaaacggcgctcggaacggacgaatcagcttcggctcgctgcggcgcagcttgaacagcgcggccatcgaaatgatgtacatcacgatagcgccaaacaccgacatggtgacgatattcgccgtcaacggttggccgccgatgacaatcagccgatcggagaaaatcgccgcgatacccaccacgccaccggcaataatgcccagatgcggcgtctgaaaacgggcattgaccgaggccagccttttaggcaaataccccgcacgggccagcgcaaatatctgtcgggaatagcccatgatgatgccatggaaggatgcgatcaggccgaataatcccaaccacaccagcatatgcagccagccgctgttattacccacgatgagcttcatcgcctgcggcaacggatcgttaatattggcgagcttgctccagtcacccacgccaccggcaaacagcatcacgccgagcgcgagaacggtgagtgtcagaatgccgccaataaaggccttgggaatggtacgctgcggatctttggcttcttctgccgccatcgaggcaccttcaatcgccagaaagaaccagatggcaaaagggatagccgcaaacatgcctgaaaacgccgccgggctaaagctgtcgcttcccgcccatccgccgtgggtaaagtgagagatctcaaagcctggcgcgaccacgcccataaacaccagcagctcgaaaatcgccagcagcgtgaccagcagctcaaaggtcgcagcgatgctgacgccgataatgtttagcgccataaacaccagataagcccctaacgcgacccatttaggatcgatggtcggaaactgcacgttaagataagccccgatcgccatcgcgatagcaggcggcgcgaagacgaattcaaccagcgtagcgaatccggcaataaagccgcccgttggaccaaacgcgcgataggcataggcaaagggtccgccagcatgaggaatagaggtggtcagctcggtaaagctgaagatgaaagcacagtacatggcggctataaccagtgcggtaatcataaagcccagcgttccggcctgcgcccaaccgtagctccagccaaaatattcacctgaaatgaccagcccgacggcgatgccccaaagatggaagctgcctaacgtgcgttttaaaaccggtgcgacttttttattctgcatgatagggttccccaacggtgtagtgacccttgatgctgcaaaggttgtaccaacctgaaagggcctgatttttataggcattagtcgccgacttgtcgccctttgcctcattttggcgcggtataagaaaggcttcgtcctaaaaggtgcgtataaatttttcggcatagcaaagccgctaaacttcattagcctgaagtccggctctgctaagataaaatcaggaaaaaatcagggagaaaccggatgtcagagcagcaaatcatcgaatggatagcgcaagacgatcagcgcatggcagcgttgcgtacagcacgaacgctagcgctaaacgactggtgcctggcggcagggtttgtgcgtaatctggtttgggatcgcctgcataagcatccgcaaaataccccgcttaacgacatcgacgttgtatatttcaacccgcaagaacttagcgccgaggcggataagctttacgagcaacgccttgatgcacttgcgccccacctgccgtggtcggtgaaaaatcaggcccgtatgcacgtgaaatatgggcgtgaaccttatcgctcaagcagcgacgccatcagctactgggtagaaatcgaaacggcggtcggcgttcgcctgaatgacaacgacaagcttgagctggttgcgccgcttggcgtcgaaagcctgtttgatttcaccatcagcgctaacccgaaacacggcgctcccaccgttctgctggagcgcgccaggacgaaaaactggaccggtatatggccgagcttaagaatcaagatttaagccgtaaatcttgcgtttgtcggtcagcacctgcgcctgatgcttgacgacctcccagattgcccgtgcggcgggcgtcagagagcgatttttacgtttgactagcatcagtgcgcggttcacctcaggcaccagcggccttacggccagcctgctacccgacggcagtggcagtgccagcgccggcagcacgctgattccaatccccgcctcaaccatcggaaacagcgtcgccggatgacctatttcctgtaccacctgagtttttacagagaaatccgccatcgctttatcgatcagctgacggctgcctgaggagtagtcctgcaataccagacgcgcgttgttcaacgctaaccaaggtacctctttcatcgccgcaaaggggttatcctgatgacaaagcagcaggaaaggctcatggagaatgacttccgtgtcgagatcggtgctgtaaccgggatcgatgacaataccgaaatcgacctccgcattacgcacgctgttcagcaccaactgttgggtctgatccctaagtaagatctgaatatctgggaatttctcttcaccgctggcgatacactgcggcatcaaatgtgcagagatggtctggctcgaggcgatgcgcacccgtccattctgctcggtgccaaaacttcgggtatccagcaacatggcgtgcagttcatcgagcaacggttcaacgcggtttgccagacggcgaccggcgtctgtcagcgcaacctcgcgcgtggtgcggtcgagcagtcgcacgcccatctcgctttccagctctttaatgctgtggcttattgccgactggctgagtccgatgacctcgccggtgcgactaaagctgccatagcgcgccacggcgataaaaattttgagctgcttaagggaatagttcatgaatcggattcattaatggattaaataaatcaattttataattctacgcgaaaagcacagaatagccgcattacttaacaaaatattgagacagatatgaaagccctgcgttttttacctgatacctttaccatgatgctggttgccaccgttttgctggcgaccgtactccccgccaagggcatttatgtcactgcgttcaatgacctgactatctttgccatcggcctgctgttctttatgcacggtgccaagctgtcgcgcgccgctatcctcgagggcagcaacaactggcgtctgcacctttgggtcatgtttagcacctttatcctgtttccgatcctcggtctgctgttccaatggtggcacccggttgacgtcagcccgcagatttattctggtttcctgtacctttgcgtgctgcctgcgaccgtgcagtctgcgattgccttcacgtcgatggcaggcggtaacgttgcggcggcggtgtgtagcgcctcggcttccagcctgctcggtatcttcgtttccccgctgctggttagcgtgctgatgcacgtgcagggtgacaccggtaacgggctggagcagatgtggcacatcatactgcagctcctggtacccttcgtggcaggccacctgctgcgtccggtgattggcaagtttgtcgataagcacaagaagatgatcggtaagaccgaccgtacctcgattctgctggtggtttataccgcgttcagcgaggcggtaacgcagggtatctggcataaagtgggtcttgggaccttcgcatttatcgtggtggtgtgcatcattctggtggcgctggtgattatctttaacacctacatggcgcgcctgctgggtttcaataaggcagatgaaatcaccatcgtgttctgtggttccaaaaagagtctggcgaacggcattccgctggccaacattctgttcccagtgagcgcgattgggatgatggtgctaccgctgatgattttccaccaggtacagctgatgatctgcgccgtgctggcaaaacgttatcacaacaagcagctgaagcttgaaggcgaaaaatcgcagcaggctgaggggagtgccaaagtgcaggcgaaattgaattaacttgtcatgtgataaataaaaaggccggtcacattattgaccggcctgttcagaaaatgattcagcggaaagatttattcgctttgcggattgtgtcccccgcgtctgagcggggtcagtaaatcctgcaaaccttcgattttaatcgccagcgtcatctccatcagcatgccgagcttgccttctgggaactccccttgcgcgcgaaccacagtaaatactcctcgggcagatcaatcaacactctgccctgatacttaccgaacggcattacggtattggcgatttcgatcagattctctttttccatacgcgttacgccccttcactttccgacagcaggcggatcatttcagcttcatcgataaccggaatgccaagttcctgcgccttcaccagcttggatcccgcggcttctccagcaatcaccatatcggttttcttcgacacgctgccggtcactttcgcccctaatgccgtcaggcggtctttggcctcatcacgcgacaaaatcgacagtgaacccgtcagcaccagcaccttgccggcgaacgggctgtttatctcttcggcgacaatcaccttcggcgctggccagtgcacgagggttatcaggtcatcaatcacctcgcggttatgctcttcgccgaggaagttgaccacgtgttttgccaccacatcaccgacgtcctgcacctgctttagcgactcgacgtcggcggcacgaagggcatcaatagaaccatagtgcgacgccagattagccgccgtggcttcacctacctcgcgaatgcccagcgcatacaggaaacgggcaaaggtggtttccttcgccttctccagtgcggcaaccagattctgcgccgactttggccccatgcgatccagaccggtcatgatacctgcactgaggcggaacaggtcggcaggcgttttaacgtactctttctcaaccagctgatcgataattttgtcacccatgccgtcaacgtcaagcgcgcggcgtgagacaaagtgttttagcgcttctttacgctgtgctccgcagaacaagccgccggtacagcgcgcaacggcctcgccctcaactcgctccacgtcggaatgacagaccgggcaatgggtcgggaacaccacctcgcgtgcgtcctcaggccgttggtcggcgataacgcccaccacctgtggaataacgtcaccggcacggcgtaccaccacggtatcaccgatacgcaggcccagacgttcgatttcatcggcgttatgcagcgtggcattgctgaccatcacgcctgcaactagcaccggctcaagacgtgccaccggcgtgatggccccggttcgcccgacctgaaattcgacgtctttgacctgagttatttgctcctgcgccgggaacttaaaggccgttgcccaacgcggtgcacgggccacaaagcccagcgtttcctgcgtttcaagggagtcaattttcaccaccacgccatcgatgtcgaaaccgagctgcgcgcggtcctgctccacctgacggtaaaacgccagcacttcgtcactgcctgtgcacagtttaacgcggtgggtgaccggcagtccccaggccttgaattgctgtaatcgctcataatgactagcgggtaacgtcccgccctcaagcagccctacgccgtagcagaagaaggtcagtgggcgcttggcggtaatacgcgaatcaagctggcgcagcgatcctgcggcggcgttacgtgggttggcaaacactttaccgccggtgcgtcgcgcctcttcattcagcgcctcaaaacccgattgcggcataaagacttcgccgcggacttccaggcgagcaggaatattgtcaccgctgagacgcagcggtatcgctcgtatggtgcgcacgttcatggtgatattttcaccggtagtcccgtcgccacgagtcgcagcctgcaccagctcgccgttttcatacagcagactgacagccagcccgtcaagcttgagctcgcagcagaaggtcagcggcgtggtcactttcagacgatcctgaacgcgtttgtagaaagccaggaagctctcttcatcgaaaacgttgtccaaagacagcatcggaacctggtgacgcacctgatcaaacgccgacagtggcgccgcgcccacgcgttgagtcggggagtcaggggtgatgagttcaggatgtgcttcttcgagcttgcgcagtgcttgcatcagccggtcgtattcggcgtcaggcacttcgggcgcatccagtacgtgatactggtattcatggtgacgcagctggctgcgcagagttgtgatttgttcttgaattgtggccatagctcaccatcttgaagataaaaaaccctcgacatgccaacatgcgagggttagtaaaagtgtggcaaatgtagctcaatcctgcggcgtgtgtgaaggctaggcggtcgcttccagcacttcgcgaatacgcgctttataggtctcgagcttctgcggcgtaatcattcgacgctcgtcgtcccacactacggcacctacgtcgtcagcgatacgctgagcagactggagcagcagcttgaagttctgatgagcatcgccgtagcacggcaccatcatgaacagcgtaatacccggcgttgagaaatcagacatattctcagggtcgaatgagcctggtttcaccatgttagccaagctaaacagcacaggaccgctgccagatgggctgacgtgacggtggaagatgttcatcgcaccgaactggaaaccggcctgtagtacgctttgcagcaggacttcacccccgataacgcccccctgatgcgcagcaacgtgcagcaccagaacggtttctttcagcttctctctcaccggctcgtcttcttctggctcggcgggagcgaaaggctgagcgtgcgattgagcacgcgcggctggcgcagcgtcagcatgaatttcagccggaggaacaggcgctgtatgctcgtgggcaggctgagctactggctcgaccggcgcttcacgatgcggcgcatgaacaggctctgcggccgaatatccactcaacagcggatcgtcctgctgagaagcaggctgatacggggcctgcgtcggcacaggtcgctgttgcggcgcgtgctgtacaggctgctgatgcgaaggctgactttgcaccggcggctgttgtgaaggttgctgttgaggctgctgctgtgaaggctgaggctgcacaggtgcctgcggcgcacgcttgggttctgcatgcatcgggacaaattgttcagcttcatcatagcttcccagagagggttcgtcatgtggatgggttgcacgtacgcgcacttctcccaccccatcaacgaagtcttcgctcggggattgctctcgttcttttttcactcgtttagctggacgatcgcgaaaaagcgaagagcgttctttacggctggtccacaaaccgtgcaataacaacgctattatggcgatcgcaccaacaacgattaatatcagacgcaagtcctgcatcattgctatctctgttgttctttatcaatcatccttcgaaataccagacgtcggcttctttcccttgccctattcacttagctaataagttcacaggaattcgttcggttgcccactgcctgcttctcgaatgcttttgggtaataattcattgccaacgcggcaaacattcacctatctaactctatttgcctgagttgataagtgcaagtctggacactgttttatgctaataaacatgattgttgcatcctttttgactacttttcgtccaacaagtgcctagtcagtgcaaaatcatatcgatatgatagcccagcctattcaattgagagagaaaatttcttttatgtcgtcatctgaagtcaacggagtgcactattttacgcaaggctggaaactcgtctccctgcccggaattcgccgtttcgtggttatcccgctgctggttaactttttgctcatgggcggcgcattctggtggctgtttagcaaactaggccagtggatcccgcgctgatgatccacgttccgacctggctgcgctggctcgattacctgatctggccggtggcggtggtgtccgttctgctggtgttcagctttttcttcagcacgcttgccaacctgattgccgcgccgtttagcggactgctggccgaacagctcgaggcgcgcctgaccggcaaacccgcacctgataccggcatctgggacattgctaaagatttgccgcgtattatgaaacgcgaggtccaaaaactggcttattattttccgcgtgcgctgctgctgttactgatccactttattcctggcgttgggcaaacgctggcaccggtgctgtggttcttctttagcgcctggatgttgtcgattcaatactgcgactacccgttcgacaaccacaaggtcagctttgccgatatgcgccgctcactggggcggaacaaggtcgacaacatgcagtttggatcgctagtgagcctgtttacgatggtgccggtgcttaatctgctgattctgccggttgccgtctgtggtgcaacggcgatgtgggtcgatcgctatcgaaacgtacatgtttcagaaatcggcagacggtagggattctgtactaaaattttagaatacttgatgttaagcacttcggtagctaactatattgccgaatcacatatcatatactaattctttacttcactgaggagggcgttcaagtatgctttttacgttttcctcctaatttcatcaaattatcctcaagagacttcgacataaggttaaggactggcatatgagcaagatctatgaagacaattcattaacaattggccatacgccgctggttcgcctgaatcgtattggcaatggtcgcattctggccaaagtcgaatcacgtaatccgagcttcagtgttaaatgccgtattggcgcgaatatgatttgggaagccgaaaaaagcggcattctgaccaaagacatcgagctggttgagccaaccagcggtaacaccggcatcgcacttgcctatgtggccgcagcacgtggctataagctgacgctgaccatgccggaaaccatgagcgttgaacgccgtaaactgctgaaagccctgggcgcaaatctggtactgacagaaggcgcaaaaggcatgaaaggcgccatcgccaaggctgaagaaattcaggccagcgatccgcagcgctatcttattctgcagcagttcagcaacccggctaacccggccattcatgaaaaaacgaccggcccagaaatctgggaagatactgacggcgacgttgacgtcctgattgccggcgtaggcaccggcggaaccatcaccggcaccggtcgttatctgaaaagcaaaaaaagcagcgtgaaactggttgcggttgagccaaccgactcaccggttatcactcagacgctggcaggccaggaagtgaagccaggcccgcacaagattcagggcatcggcgcaggctttattcctggcaacctggatttggaactgctggaccgcgtcgaacttatcaccaacgacgaatctatcgagtatgcgcgccgtctgatggacgaagaaggtattctggccggtatttcttccggtgcagcggtcgctgccgcagtgaaactttctgaagaaccagagtacgcagacaagaccatcgtggtcatcctgccgtcgtccggcgaacgttatctgagcaccgccctgtttgcagatttgtttacggaaaaagaattgcaacaataatgccaccttccgaaaagtgaacaaaaaagcaccttgataggtgcttttttgtggtctgcatcaaagtttagtgcagtctgtgattgattttccccgccaggtttagtatttaacccttcaattatttcggtgcgtaaaattaatcgctcatacaattgcttctggctgaatcgatttactgatttgttacagcagggtaaatggcggcataatggaaacgagacggaaaagatttagcatggattcagcggatttatcccggcgtgcaaatttttgctttttctgttgcatcggagttcgcctctgaacgtgattcaggcgttaatctcacaggctaaagcaaggtctatacgctaaactttagctccacaacattactttaaattaagttggggaatcatcaatgttccagcaagaagttactattactgctccaaatggtctgcacactcgccctgctgcacaatttgtgaaagaagctaaaggttttacttcagacattaccgtgacctctaacgggaaaagtgccagcgctaaaagcctgttcaaactgcaaactttgggtctgactcaggggactgtcgtgactctttccgctgaaggcgaagacgagcagaaagccgtcgagcacttggtaaaactgatggctgagctcgagtaagaagcttcgtcacagggacagttaacaggacgtttttactttccagccaaatttatgcccacgtaataacgtcctgaacggtctcgataagagttaacaccagtcaacagtaaggtagggttatgatttcaggcattttagtatctcccggtattgctttcggcaaagcattgttgctgaaggaagatgaaattgtcatcgaccggaaaaaaatctctcctgacaacgtgaatcaggaagttgaacgtttccttgcaggccgtgctaaagcctctgcccagctcgaaacgatcaagaccaaagccggtgaaaccttcggtgaagagaaagaagccatcttcgaaggccacatcatgttgttggaagacgaagagctagaacaagaaatcatagccctcatcaaagatgacaaatccaccgccgatgctgccgcctactcagttattgaaggccaggcaaaagcgctggaagagctcgacgacgaatacctcaaagagcgtgcggccgacgtacgtgacatcggcaaacgcctgctgagaaacattttgggcatgcctatcgtcgacctgggttctattcaggacgaagttatcctggtagcaaccgacctgacgccttccgagaccgcacagctgaacctgaacaaggtgctgggcttcatcaccgacctcggcggacgcacctcgcatacctccatcatggcgcgctcacttgagctgccggcgattgtcgggaccagcgatgtgaccaagcaggtcaaaaacgacgacttcctgatcctggatgcggtgaataacaagatttacgttaacccgacgccggaaatcatcgatcaactgaaggccgatcagaaccagtacatcagcgagaaagacgagctggcgaaactgaaagatctgccggcgattacgctggacggccatcaggttgaagtctgtgccaacatcggtaccgtgcgcgacgtcgccggtgcagagcgtaacggcgcagaaggtgtaggcctgtatcgcaccgagttcctgtttatggaccgcgacagcctgccgaccgaagaagagcagttccaggcttacaaagccgttgccgaagcaatgggctcacaggcggttatcgtccgtaccatggatatcggcggcgacaaagagctgccttacatgaatctgccgaaggaagagaacccgttcctgggctggcgcgcaatccgcatctgtttagatcgtaaggaaatcctccacgatcagctgcgtgcaatcctgcgtgcttctgctttcggtaaactgcgcatcatgttcccgatggttatctccgttgaggaagtgcgcgagctgaacggcgagctgaagatgctcaaaggccagctgcgtgaagaaggtaaagcctttgatgagtcaattgaagttggcgtgatggtggaaacaccggcagcggcagtgattgctcaccacctggcgaaagaagttgatttcttcagtattggtacaaacgaccttacccagtatactctggcagtagatcgcggtaatgaactgatttctcatctttataatccaatgtccccatcggttcttgcgctaatcaagcaagttattgatgcatctcatgccgcgggtaaatggactggcatgtgtggagagctagcaggtgacgaacgtgctacacttctcttattgggcatgggtttagatgagttcagcatgagcgcaatctcaatcccacgcatcaagaaaattattcgtaatacaaacttcgaagatgtgaaggcgctggcagaagaggctctggcccaacctacggcgcaagagttgatgaatttggttaacaaattcatcgaagagaaaacactctgctaattgcgcgttgctggaaagctgcccaaattaatgcttaggagaagatcatgggtttgttcgataaattaaaatcattggtttctgatgataagaaagatgcaggcacaatcgagattgttgcgcctctgtctggtgaaattgtcaatattgaagatgtacccgatgtggttttcgccgagaaaatcgtaggcgatggtatcgcgattaaacccgcgggcaacaaaatcgtcgcaccggttgacggcaccattggtaaaatcttcgaaaccaaccatgctttctcaatcgaatccgacagcggcattgagctgtttgttcacttcggtatcgacaccgtcgaactgaaaggtgaaggcttcaaacgcattgccgaagaaggacagcgcgttaagaaaggcgatttgattatcgagtttgatctggccctgctggaagagaaagccaagtcaaccctgactccggttgttatctctaacatggatgagattaaagagctgattaagctttctggtagcgtcatcgtcggtgagaccccgatcattcgcatcaaaaagtaagaccactcttgatgaaaaacggcgctattagcgccgtttttttttgcctgaattccaaagttcaaaacttataccaggcttttccagtggggaaccttgagaacgataacaaggcctctaggagagccgttacgcgcttcaatcttcccatgatgcgctaccatcacctttttggtaatcgccagcccaaggccgtagcctttgccagaaagcggtgacatcacgcgtacaaacggatcgaagatgctcgacagcttgtcttcctctacgcccggcccctgatcggccacctcgacgcacaggtcatcctctttcgacgtcagcgacacgttaatcgcctgcccgcgcgccgagaagcgcagcgcgttgcgcaccacgttgtcgatagcacgacgcatgagctcggcgttgcccttgacggtgtaatccagatcgccctgatgattacagttcaaaatgatatcgacgcccggaagctgtgcctcgtagcgagcatcgttgaccaccgcctcgaccagtccatagaggtcaaaatactcctcatcgggcaggttgctatgctcggtgcgcgacagtgccagcagctcaccgatcatcttgtccagtcgtcctgcctcatgctcgatacgtttgagcgaggtttcgacattcagcgggttctggcgcgcaaggccaatcgccagctgcagtcgtgccagcggtgaacgtagctcgtgcgaaacgtcgtgcagcagctcttcgcgggccttaaccagtacctgcaaacgctcggccatcgagtcgaagtcgcgcgcaacctcagagagttcgtcatggcgcttgcccatggtggcaaacaggcggaccgataaatccccttgcgacactcgcccaaaggcctgacgcatctgcagcatcggacgggtcaggttccaggccaacatggtgctaaaaagcagcccgcctatcccgcctatccatagaaacgggggtggcatattaaaccagtgttgctctctcttcggccgatactcatccataagccctttgacgttgtagcgcagtcggtagccttgcccatcgggtgcctgaacaaattcaacaatttcctgaggagttgtcttgcccggctcaaggtcgttcaacgattctcctttgatcggaatcatcgaagattctatcgtgaataaacgtctgtcgtcgggaggccagtcggcaatcatcgcattcagggcaggcaatccgccggtgtgcagtgtcgattccgccgaggtgatttgcagtttgacaaagcgccgtgcgatactactttccggcggctcatggtggtaatagaaggaaaataccgcccagagaacctgggccatgatgacaaatgtcagccaataacccagtaaaatcttccaaaagagcctgccgcgcaggcgtttatcggattcgatagccaatgcttcgcaccgtttcaatcgtcatgacatcgccgccgtttagcgacgcgagtttctgacggatgttgctgatatgtacgtcgatgctgcggtcgtaagcttcgcgcggacggcccagccccttctcggacagctcgtccttcgacaccactcgctccggtgagcgaagcagcagctccagcaggttaaattctgatgcagtcaggtcaaacgccacgccctgccattcgctgctgcgggtcgccgggtttaacgtcaggtcaccgtagtgaatgctcgatgaatcagagtgtgtgtcctgctgctcttccacgcggcgcagtacggcacgcagacgcgccaccagctcacgcgggtagcaaggttttggcatatagtcatcggcacccatctccagaccgatgacgcggtcgatgttgtcgcccttcgccgtcagcatgatgatcggcaatcggctgtttttacgcacctgacgcagcacatcgataccgctcatatccggcagcatgatgtcgaggatcatggcgctgtattcgcctgacatcgcaccttcaatgcccaatttaccgttcagcaccagattggcatcaaagccttcggcaatcaggtattcacaaagcatggtgcccaattcgagatcgtcatcgactaatagaattttcattatttttttccgcctggcatatttccgctcatttttacccctatcccgtcatgccgcagtagcatttactctatttttaccttttacccattttagtcacagaaaacgggcgctatctccccacaaacgcgctaataagcggcatcaagccagcatgaatatggggctcaggtaaaacagatagttgtagtataggaaacgaaattccgtctgcttaattcgatgattttaattaaagacgccggtagagagataacgatcgccacggtcgcaaataatggccaccacgatggaacccggatttgccttcgcgacccgtaaagctcccgccacggcaccgccggagcttacgccacagaagataccttcctcacgcgccagtcggcgcatggttatctccgcttcgacctgtgccatgtcgataatctcgtcaaccagctcgggctggaagatgcccggcagatattcggcaggccagcggcgaatgccgggaatgctgctgccttcgtccggctgtaagccaataatacgcacgtcggggcgctgggacttaagatagcgactcacgccgctaatggtgccggtggtgcccatgctggaaacaaaatgcgtaatccgtcccgccgtctgctgccagatttcagggccagtcgtcgcgaagtgcgccaacgagttatcagggttgttaaactggtccaagactttcccctcgccgcgcgaggccatctcctgcgccaggtcacgtgcaccttccatcccctgcgcgcggctcaccagcagcagttctgcgccgtaggcacgcatcgccgcctgacgttccatactcatattttcgggcatcagcagtttcagcctgtagccctttagcgcagcaatcatcgccagcgcaatgccggtattgccgctggtcgcctcgataagcgtatcgcccgggcgaatttcgccacgtttttctgcctgatcgatcataaagaaagcggcgcgatcttttaccgatccggccgggttattgccttccagcttgacccaaatttcgctatcaagatcctttgacaggcgctgtaaccgcactaaaggcgtgttgccaatatattgttcgagcgtgctcactgtagctgccttatttcagatgggtataataaccgcactaaaatgaataaatgagtataagacgataaaaagggcggaataaccgccctttttttaaccatactaattaaagttgaagaattttaaaactattacgcagttttagcgagctctacagattgcagctgctggtcgcccgcgtacagacgcccgtttaggccacccacgaagtagcgatcgccgcgctgcggtggacggtggtcttccgtctccgacaacactacggaaatcgggtcatcgagccagccctgcggctgtacggtcaactgccagaagtggccgcgcgggctgacttccaacacctgcaccggcagcggacatcgcgtcgtgctttgagtggtgatttccatctcccacggacgcagaaacagatcaaccggtccctgatgaagcggcgcgatagccagcggccagtgatgctgaccgacataaagctgagagccgcgaatttcgccgccaatgcggttcacttcgcccataaactccagcacaaaacgcgtagccggttcgcgccagatttcgattggcgtaccgacctgctcaatgttcccctgactcattaccaccacgcgatcggcgacttccatcgcctcttcctggtcgtgggtcacgaacacgctggtgaacttgatctcttcatgcagctgacgcagccagcggcgcagctctttacgaacctgcgcatccagcgcaccgaacggttcatcgagcagcaggatttgcggttcaacggcgagcgcacgcgccagcgccacacgctgcttctgaccaccggaaagctgggccggataacggttccccaaatggctcagttgaaccatttccagcagtttggcgaccttctgtttgatggtcgcggcgtcaggacgctcgcggcgcggcagcacggtcaggccgaaggcgatgttgtcaaacaccgtcatatgacgaaacagcgcgtaatgctggaacacgaagcccacctggcggtcgcgcgcgtgcaggcgcgtcacgtccttaccgtggaagctcagttgcccggaactttggttctcgagcccggcgatgatgcgcagcagcgtagtcttgccagagccggaaggcccaagcagcgcaaccatctggccggagggaatatcgagggagatatcattgagcaccttggtgcgaccaaaaaacttgttgataccgttaatttcaatgctcattgtttccctcccgctcaagacggtcattgttgcgcgccaggcgccattgcaaaccgctcttcagaaatagtgtgacgattgccatcagggtcagcagcgcggcggcggtaaacgagcctgcgatgttgtagtcctgattcaataattcgacctgtaatggcagcgtgtaggtttctccacggatagcgccggaaaccacggacactgcgccaaattcaccgatggcgcgtgcgttggtcaacaccacaccgtacagcagcgcccaacgaatgttcggcagcgtgacgcggcggaacatctgccagccggaggcgccaagcagaaccgcagcctcgtcttcctgactcccctgactcagcatcaccggcaccaactcgcgaatcacgaacgggcaggtcacgaaaatagttaccattgccatgcccggccaggcgaacatgaactgtaggttgtgcgcctcgagccagccacccagcgggccattgctgccataaaacagcagatacagcagccctgccaccaccggcgacacggcaaaaggaatatcgataagcgtcagcagcagctggcgtcccggaaagttgaatcgcgctaccagccacgccagcagggtaccgaaaaccagattcaccggcacggtaatcagcgccatcaataccgtcagccagatggcgtgcagcatgtccgggtcggcgagatttttgccgaccgccgcaatgccgtccgacagcgccaagacaaaaatggttatcatcggcaccaccaacaagaacacgcaaatcagcgtgcccagaccgataagcgaccatttcagccagtcgatgcggcgtggtgcggagtcttcaacctgcgttaactgcgacattattggcctccaagacgacggccgtaacggctttgcaaagtgttaatcgcgaacagtagaatcagcgacgccgccaggatgaccgaagcgatagcgctggcggccgcatagtcgaactgctgcaaacgcacgaaaatcatcagcgaggtgacttccgtcttccaggcaatattcccggcgataaaaatcaccgcgccaaactcgccgaggctgcgggtaaacgacagcgccgtgcccgccatcagtgaaggcatgacttcaggtaacaccacgcgacggaagctctgccagcgcgaagcgcccagcgtttcagccgcctcttcgtattcagggcccagctcctcgagcaccggttgcacggtgcgcaccacgaacgggatgctggtaaacgccattgccacggcgatacccaaccaggtgtaggccaccttgatatcaaaatgcgctagccactggccgtagaagccgttcaccgagaacaggccggccagcgtcaagcccgctaccgccgtcggcagcgcgaaaggtaagtccatcaaaccatcaagaatggtcttgcccgggaactcgtagcgggtcaggatccaggccatcagcatgccaaaaaagccgttaaagatactggccaccgcagcagacagcagcgttactttgtacgccgcgaccacctgtggatcggtcactaccgcccaatactgtgccagcgtcatgtgcgacagctgaataatcagtgcgctcagcggtaaaagcagcaccaggcaaacgaacagcagactgctgccgagactcagcgtaaatccgggtaatacgcgtttggtagacaacaacattactggtgtccctgcgcgatcagtttgtccagctcaccgccggtatcgaaatgggttttcatcacttgtggccatcctccaaattggtcttcaactttaaacagcttggtcggcgggaactgcccttcgcctgttccatgactttcttgtcgtacacacggtagctgaagcgggtgataattttctgcgcctctgggctccacagatagttcaggtaggctttcgccgccttctcggtcccctttttctcgacgtttttgtcgacccaggcgaccgggaactcggccaaaatatcgaccggcgggacgatcacttcgtatttgtctgccccgtactgtttgcggatgttgtccacttctgactcaaagctgatcagcacatcgcccaaaccgcgatcgacaaaggtggtcgttgcgccgcgaccgccgatatcaaaaacttcgacgttcttaatcaggcgagccatcttctcgcgcgtttgtgcctgattgttgccgtcttcaaggttaaatgcccccaggcgcccagataggtatagcgtccgttgccagaggttttaggattcgggaacaccagcttgacgtcgctgcgggtcaggtcgtcccaggtatgaatattcttgggattgcccttacgcaccaggaacgccatggtcgaatagaacggcgaactgtggttcggcagacggctttgccaatccgccgggatcaggttgccgcgatcgtgcaaaatctgcacatccgtgacctgattataggtaaccacgtcggccttgaggccctgcaaaatagccagcgcctgcttcgaagatccggcgtgcgattgtttgacttccaacttgtcgccgttattttgtgcagcccactgctgttcaaacggaggattgagggcagcaaagagttctcgagaaacgtcgtaagaactgttcaacagttctgtcgcaccggccgacgctgcgccaccgaccagtagcagcacggcaatcgcgcctcgcagggttttactcttcaccaacgtatttttcattctcagccctggtccgatttactgtcgacgtggcgcacgggtgcaaccttggacttgtagtgtatttataactacggcggtaggagtaacggttttatatactatttggtgatttacaagcatgaaaagctataagccacacaaatcaagggaagatagtcgatgcactcgcgtgcatcgacattgcgcctggcgggggtttacagcgtttgcagccgcgtcagggacggggcgaaatagtagctgccggtaagcgggcgcgtaaaacgcagcatggcgtcacgtttaccgtcgagatcgccgaacatgctcagcagctgtttctcgatgttataaaggcgcgcgcagtaggtgataaagtacaggccatgttcaccgctggcggtgccgtaaggcaggctttgacgcaaaatcttcaggcctttgccgtcctctttgaggtcaacgcgaccgaggtgcgaggtctctttgcgctgttcagcgggcagctcttcatcggtcaacttggtgcggccaatgatctcttcctgctgagccacagtaaaacgctgccactgggtcagattatgcttccagcgctggaccatgacatagctcccgcccgcgtcgtcatttccctcggcaatggcggccacttcggcgcgcttctccccttttgggttctcggtgccgtctacaaagccgctgaggtcgcggtcttcaatgccgcgaaacccgtggatctcttcttctatcagcagacttttgccaaacgccgcgacggccgcctgtgccagcgcgaagttaacgtcatggcgcagagactgaatgtggatcaacacgtcgcgctgagtcgcagggcgaggcctttccccagcggcacgaaaggtttgagttcatcggctccgataccgccggacaagtcgcgccagacatcgtggccaaaggccactaccgcaccgactttatcgtcagggaatcgtgattggatctcagccagtgactggcagaaggtgcgacatccgaggcgaacgtcgtcaagttcaccttgaaccttcgcttcgatatagatagcaaaacggcaatgctcaagcagaatgccgctctgaacctgggtcataatgttcctttccttgcgtcatcggcgaccgtaccaggcttttaaagggtaaaaacctgccgtcgcaatggcgcgcattatacccgcaataatgataaataatgaataaagccttgttaaacacaaggcttttgggaggaacgagattagttgttagccgcgtgccagacgattttactgactttccagttcttgagactgtcgtcggaaggcatcagctcgtccggaccgtcccacgcgccgctgaagatatagctgacgtgctggctgttcggcgctttacattcgacgttctgtgcgtcgtcgccctgtcctttctgacaggcgtcaaaggccttggtgtagaggtcgctaaacggcgtacctatcttcacgccccactgacttttcacatctgggtcggagacaacaatacggtccacgttgcccttcggttctccagagacggtaagcttgaccgttttaccgtccatcgcctgatagaacgagcgcatcttgccgttgctcatcgacatgccgctcatcaggcgataatcgccgttcaggccgtcgttgaccgcagtctcgttcaacggtgtacttgcagtgactttgccaacgccttcatcggtaacctcaaggctgctgccaaaccagttgatcggattaaggcttgaccacgacatctgcggcatatgcatatttgccatcgtcgaacacccggtaagcatcaagggcagcgccagcaacagtgggcggatagtcatgtcatacactccttggtcgtttttttgatttgccgtaatcatgcgaataataatgccagaattatcttgctggcctgttggagtgcatccgccgcaaaaagtgccgcagattgttacttttcgccctaaaagcacctcacaccaatcggcgttcttcaccaaaacaggcgcgaaggcggcggctgagcagccaataggccaatgcgccggcatcaagcagcgccagcgcaaagtcgagcaggtttggctcatccatcgactgccacatgccaacgccttgcagcgcgaaggtcgcgaacatgcccgccagcagcagccaatagctcatttgccagatttttggccacaggtgacgtcggctactgagcagaaagatcaggaccggaggaatgccgaggaaaatcccgtaccagaatgagtggcgatcgggataaaaaagcgcgaggagcccttctccctgctgccttgatgcaccggccataataaacagtaaccaggttcgcgcctgcaaaatcaatatcgtccagaaccacagcggcagacgtagcatgccgtggctgttgtaatcgtcagaattcatagccaggaaaaatcttcctttaattcaataaggacgcaaaaaggttgcgtcggaaacccaagccgagcgcgcgttaagccagttggccattttgcacttttgtttatatctctgcgcggtcagcctgaaaaccgtctttagcataaattaagttgtcttaagatagtgttaagaacagtctgctttaattttcaccagggcaacggttcatcccagccgatgacggtgcctgttgttcactgaaatcaaaattaaggatgactattatgatgaagaagataactctggcaagcctgttcgcactgacgaccctcccggcactggcacaaagcgacggtggttttctcgatccggccgcgcaacaggcgcagaacaaaggcggcttctccggcgaaaatgccactcttacagcggcaagagaggtgaaaaacctcaaagatggccagtttatcacgctcgaaggacacatcgataaacgcacgggtaaagataaatatattttcagcgatgcgaccggcacggtgacgaccgaaatagacgacaagcgctgggaaggccaaaccgtgtccccgaaagataaggtccgcctcgaaggaaagatcgataaagattggaattccgaaaaaatcgaggtcaaaaggataaatatcattaattaatcattaactcagagtttcccttgcagatttgaaggtatagaaaagggaaactctgtagcacgttcttcccgttgcccctctcccccgccgtgcccttgtattcactgtaaaggctgctaggttaataattattatcattcacacccaggccatgtggcatagcgacaatggaaaatattccgaaccctcagagccttgttgttggcaacatctacacgcgtgaagatcttaagtatctctttactctggcggacgctcgcataaaaacgggcgtcttccgaccacgcgagaaccagtcgatgtggttatttgtgacggaggataaaaccaacggacgacggcactacaaaaacacccttggcgatacgcctatcaccctgattttaagcactatcctcccacctcccgaaaatcgcgactctctgataccgaccaacgccgaaatccagtcttacagcgccaatgatgaagaatgcctggaggatgatccgctgcaatcggtcgaaaacggcgacgcgcaagatgaatttagcgcccaacacgttgaagacgagagaaaaaaggtattgcgttcgatcattcgccgtcagggtcagtcgcgatttcgcaaagcgctgctggggcctatcagggacagtgtgctgtgacgggatgtaaggtgaccgaactgcttgaagcggcgcacattcatccctacaggggcgagcacaccaacaaggtcaataatggtctgctgctgcgcgcagatattcacaccctgtttgaccttgggctaattggtattacgccggatacgctgcgggtggtagtgtctgagaaattgcggggaacggaatatgaaaccttgcataacaggccgctaaacaggccagagaatcaggaggatatccccagtctggaggcgcttcagtggcacaatgaaaattcgtatccttatgggtaatgcgtttaccctccgcgttccggggctgatgacggccactgaaagcacagccccggcaggatgaatcgcgatcagtattcctggtcaacaatcagtcgtttacccaggctgatactctccaccacttcgtaatccagtttttcatacatgctaatcacagcatcgttctctgcacgaaccatcagctgaattttagggcagccgcgggcaatcagttttttctccagacggttcatcagcgcattggcaatgccgcgtccgcgatactcgggtgaacgccaagataataggccgatccacgatggccgtcgtagccacccatcacggttcccgccacaacgccgctcacttcggcgaccagaaacagttctgggtcgtggtttagcttgcgttcaatatccagctcgggatcgttccagggacgcaataggtcacagcgctcccaaagggtcagcacttcttcaaaatcttcttgtttaaatacgcgaatttccatcactgttcgccgctgtaaatgagttcttaattgattatcgcgtgatctgcttgatacgcaatatcaaaatggccgcttttagcctatcaagataatttttttcgccgaattacacgctttttcgccttaatgttgatgattaagacaggcaaaagctaaaaatcaggaaaatatcagactgataaaatgttaaaaacgcacactttgttaataaacagcaatagttctcatctcgattatgctgaatggatactatataacatccgcattctgctattaaaaagggctgcggacagatgctaaatccactcaacaagtttcttcatttccaaccgcttcctcgttcagccacgcgacgtcaggtgctccttagcggtcttgggctggcatttggcgcatttggtagccggtttgcacaggcccagcaggccgaacacatcacgaaaacggcccctaagccaaaaccgcctggcgctaaaaagctggtgatgatcgatcccggccacggcggaatcgactccggcgccatcggtcatgaaggctcggaagagaaacatgtggtgctggaaatcgccaactacgtgcgtcagcacctgcaaagtcaccccaatatcgaggtgaaactgacccgtgattctgaccatttcattccgctttatcagcgggttgagattgcgcacgagcatcaggccgatttatttgtttcaattcatgccgatggttacaccagcccggaagccagcggggcgtcagtgtttgccctttccaatcgcggtgcgaccagcgcgatggcccgttacatgtccaagaaagagaacgacgccgacttggtcgccggtgccaagtacaaggaagccgacaacaactatcttcaacaggtcttgtttgatctggtgcaaaccgacactatcaaaaacagcctgacgctgggccatcacgtgctcgacagaattcgtcctatccaccatctgcacagccagcagacggaacaggcggcgttcgcggtgctgaaatccccgtcgattccgtcgatattggttgaaacctcgtttattactaatcatcaggaagagcagttgctgaataccaccgccttccgccaggaaattgcgctggccatttctcaaggcatcgtgaatttcttcgcctatttcgacgctcacgaacgaattccgcgctgatggtgcaaacctgcggacaaataagggtataataatgccctatttgtccgaaagcctacgagtttgcccgtgaatcaattacccgatattaaccaagtaaaagcctttctgctgtcgctgcaagaccaaatctgtcaaaagctgagtgccgttgatggccgcgcacagttcaaacaggaccaatgggtcagagaagaaggcggcggcggccaaagccgggtattgaccggcggtgcgatatttgaacaggcgggcgttaatttctctcatgtttccggtgcgaccttaccggcctctgccaccgcacaccgtccagagctcgccgggcgcagttttcaggcgatgggcgtctcgctggttatccacccgttaagcccctatattcccaccagccacgccaacgtgcgcttctttattgccgaaaaacccggtgaagccccggtatggtggttcggcggtggcttcgacctcaccccttattacggcttcgaagaagatgcgcgtcactggcaccagacggcagcagatctgtgccaacccttcggcgacgacgtctattcgaaatataaaaaatggtgcgacgactacttcttcatcaagcaccgcaacgaggcgcgcgggataggcggtctgttcttcgatgacctcaatagccctgactttgcacactgctttgccttcatgcaggccgtcgccaacggcttcacagacgcctatctgccgattgtcgaacgccgtaagacactgacctggggcgagcgcgagcgcgaattccagctttatcgccggggtcgctacgttgagttcaatctggtgtgggaccgtggtacccttttcgggctgcaaaccgggggcggactgaatcaatcttgatgtcgatgccgccgctggtgcgctgggaatacggcttcgagccggacgaaaacagcccggaagcagcgctttatcgcgattttctgccggttcgcgactggctggcggagtctgaataatgcaaatctgggtcgatgccgacgcttgtccgaacgtcatcaaggaagtgctgttccgcgccgcggagcgtaccggggtgatggtcacgctggtcgccaaccagataatccgcacgccgccttcgcgtttcctgcgcacgctgcgcgttgaggcagggtttgacgtcgccgataacgagattgttaagcgcgtcgagaccgggatctagtgataaccgccgatatccctttggcggcggaagtcattgagaaaggcggtatggcgctcaacccgcgcggcgagcgttacacccccgaaaccattcgtgagcgcctgaatatgcgtgattttatggataccctgcgcgccagcggcgtgcagaccggtggccctcctgtgctcaaccagcgcgaccgccagcagttcgccaacgaactcgacaagtggctggtgctggcaaagaaatagcgctgattttggctcccctctcgacggggagctagcagattaaagcggttctgtctgcgcttcgaccaccgctaacgcaaccatgttaacaatgcgccgcaccgacgctatcggcgtcagaatatgcaccggtttcgccacgcccatcaacaccggtccgacggttacccctctgaactcgtcacccgcagcaggttatagcttatccgcgccgcctccatattaggcataatcaggatattcgccgccccttgagtgggctgtcgggcatcaagtcgtggcggatgctctcgaccagcgcggcgtcgccgtgcatttcaccgtcaatctccagacccggtgcgagcctgttgaccagctccagggtgcgacgcatcttgcaggccgtctcaccgtttgaggtgccgaagctggaatgcgacagcagagcgactttcggctcgataccaaagcgccgcaccgtttcagccgccagcaacgttatctcggctaactgctcagcggtcggatcttcgttaacataggtgtcggtgataaaagtattgccgctgggcagcagcagcgcgttcatcgccccgccacccgcacgccctcacggaagccaaacactttctccaccacctcgtaatgttcatgataagtgccgatggtgccgcagatcatcgcatcggtttcaccacgcagcagcatgatggcggcaatcagcgtcggattgccaataaccgcacgccgcgcctgctcctgcgagacccctttacgcttcatcaactggtagtattcgctccagtactcgttaaaacgcgggtcggactcgttattcaccacggcaaaatcacgccccgcctcaatttgcagccccagctttttaatgcgcatttcgatgacgttcggcctgccgaccagaatcggtttcgccaatccgagcgagataatctcctgcgtggcgtgcaacacgcgcgcctcttcaccctcggcaaacaccacccttttcggctcttttttcgcctgcgagaaaattggcttcatgaacaggttggttttatagacgaattcgctcagcttctctttgtaggcgtcaaaatcttttatcggacgcgtggcaacgccagagtccatcgctgctttggccaccgcaggcgcgatattgacgatgagtcgagggtcaaagggttttgggataatgtagtcaggcccgaacgacaactcttcttcgccgtaggccgaggccaccacgtcgttctgttcggccaacgccagatctgcaatcgcatgcacgcaggcgagcttcatctcctcgttaatcgtcgtcgcccctacgtcgagcgcaccgcgaaaaataaacgggaagcagagcacgttgttaacctgattgggatagtcggaacggccggtacagataatggcgtcaggccgcaccgcttttgccagcggcggcaaaatttcgggttcaggattagccaatgccagaattaacgggctggcggccatagttttgaccatctcctgcgtcaatacgccgggaccggagcagccgagaaagatatcggcatcgggaatagcgtcgctcaggctgcgttgcccgttgtcctcgatggcgtaggctgccttggtttcggccatattttcttcgcggcccttgtaaataacgccacgcgaatcacaggcggtgatattttcgagtttgaggcccagtgcgaccagcaaattcagacaggcaatcgccgaagcaccggcgccggaaaccaccagtctgacgtcggcaatgtctttgttgacgatgcgcagaccgttgagcaccgcagcggtacagataatcgccgtgccgtgctgatcgtcgtgaaataccggaatattcatccgctcacgcagttttctctcgatgtagaagcactccggtgccttgatgtcctcaaggttgatgccgccgaaggtcggttccagcgaggcaatcgcgtcgatcagtttatccggatcgttttggtcaatctcgatatcaaacacgtcgataccggcgaatttcttaaacagcacgcccttgccttccatcaccggcttaccggccagcgcgccaatattgcccagtcccagcaccgccgtgccgttggaaatcacgccaaccaagttgcctttagccgtgtatttgtaggccgccagcggatctttttctatctccaggcacggcgcggccacgcccggtgaataggcaagtgcgaggtcgcgctgggtcgccaaaggcttggtcggggaaacctgaatcttgccgggaacgggaaactcatgaaaatcgagcgcactctgcttcaactgatcgtccatcatcggttcctttttattatgcagggactgagaaattccagttaaccagtataaggagcaaaaaaaggtaaaccttgaagcggctcgaaaagcggaaaaacagcttgcccgagagagactgggcaagcgagaaactactgagacatattgagaatggtgcggatattcagcgctgaggtagcgataatgtcgatagcgccagtgcgcaacgcgccaagaatcgccagcgccttggtattctcggaggcgatggcaatcacgcagggaatctggcgcagttcgtcgatgctgaggccaataacgcgttcgttcatcaccgtatccacgtgctggccctgggcgttgaaaaagtcataaccggctacgtcgccgatcacgccttgattgaggttggcatcgatgatttcatgcggcgtaaaccagcccagcttgaccatgtagctgttttcgttcatatcgccaatgccgaccagcgcgatgtccgccttgcgggcacggtccagcgtttcgttgatggtgccattacgcatcagcgcttcacgctgggacttctcctcaacgtaggcaggcgcgtaaagcgtttcgctaatgccaccgaacttcttcgccagccgacggctgatgtggtcggcgttaatcgaatcaccgggacgatgggtaccgccaattccacagataaacttgcactgacgctccggcatgctgcccggatgatcggcaatcgccgccacgttgcgcccctgcccgacggtaattaccgtttgatctttcagcgtcgaggccagatagttcgagaccagcgccgcgacctgacgacgctgttcgtcttcgtcctgatggtcgagggcaatcagcgcacgtttaatcggaaaacgttccatcatctgctgttcaagacgggtgctgaaaacgggatgatagcgaacgttgatctcgacgatgccctcttctttcgcccgcttaagcaggcgtccgaccttgatgcgcgagatcccaaattttttagcgatctcttcctgagttatttcgtcctgatagtaagcgacggcaatctcagtcagcagttcgttatcttgaatgacagtttgcttttccatccggggctcaattctcctggcaaattctgcctttttatacgctaatcaacgattattgcctagataaagacataacgacagcatggcataacgaggcgggaaaaaggaggcacaaagcgggggtttgaggagagcgcaggccatgatgacctgcgctctgggcagtaaacgtctcaatcagcgcttgatggcatcgattttcagcatccgcgcaatgacgatatccagctctttctcgtcgaaaatctgcttccagtcttccttgatgattttttcacggccgtactccatcgctatcatacaggcgtcggagaacgggttggtgctgcggaaggccacggcgagggcaatctggatgtggccataaagcatcgccttcgctgcttcttccggtacgccgcacgacttcacggtttcgtcgagtgcctctttcatgaatgaaccgaccatacaggccacagtttccaccagcgttggctccaggtaagccagctgtttaacggtcacccagtgcacctgctccaccggtccgtacatgacgctcaccaccttcgccagctcggcgcgatcggcatcgctgccctgctcgtaggaggccgccacgtgctgaaccgccgccacgccgccgaaggcatcggcgtgctcttccttggtgtaacggtcaaggaacaccgacgggtgacacgggtgcgcgacggcgtatttgatgtcggcgcgctgggctatcagattggcataagcggccgccgggtcgagggtcagtaacaccgctccagccttcattttcgggacaatggcggtggaaaccgcacccagtgcgatatccggcacggcgaggataaccacatcgctatggcggacgacgctgtcggcgtcggagatttcacgaccctgagcctgtacctgcatctgcgcatgcggtgaattctcacagtaaaacacctgatagcggctgttctggaagttggcagagatacgcatgcccattttgccgccagcgcctattacggtaattgttttcagagtcgtcgtcatgatgccttcctcacttaaaaattgaatttatataaagttgtaaaacccgctttcaagattggcgggacagcaaaaattcgagattgtgacgcgtccacgcgtcttctaaagcacaggttgatgcggcatcttcctgccacggcagccagtgctcgataatctggtttatcccccgtgcctgcggcttcacttccgctatcatcgcgtcgtagtcgagcaacccttcccccagcggacagcccgcgaaggtaaagccgacccagccatcgcggcgcgaaaacgcaaaatcttttacgtgcagattcagcacgtaaggcgcggtactggcgatcacctctttgggcgtctccagcgcggcaacgcagttggcgggatccagacaaatccccagccacggcgagttaaaatgtttcactaccgccaaattactggcggtcggcacctgctcgtaggtctcaatgcacagcgcgacttcgctgcgttcaaacgccggcaaaatgtgcgccagctgctgctgcgcctcagcaagcgtcgggcgcgagtcgggaccgttaaacatcgagcgcaggattttggcattcagcgcctgcgccagttgcagatagcgttcgaggtgttcggccttcagcccgcgtgtgccgagctcgagcaccacaccgagcgactcggcgcgctgtctcagctgctcgaggccatcgaccgacagcgtctcgatttttgggtaatcgcaaatctgaaatacctttccgcccaactcggcggtattttccagcatcgcgtcgaggcccatcggttcgggaacgcggtctgacagtcgccagaaataggcgtaggtgctgagtccaatggccatcgttagctcctgtcagcctggttgttcaagaaaatcaatgcttcatcaaggatggctttataggccgccggctggtgcgagaaacggccgagaaacaggccgcccgttctgctgccaagctgagagagcaagccgggaccggcgctgccgccgtaaatcacccgacgctcgccgctgccccgcccaccagacgctgcgccaacccctgacaaacttcccctataaaatctgctgaggcaggctctttcgcgccgatggcccactgcggctcataggcgaggattgcgtcaccgctcagcccttgtttttctgccgggccaagcgcctgatgcgcctgttcgacggcctgttcaatggcctgcgcggcggagcagcgttcggcctcaccgatgcaaatgaccgggatcagctgattgcgcagcgcagccgtggttttatcggcaatttgcttatcggtttcagcaaaatagcggcggcgttcggcgtggccgatttcgacataaccgcagcccatttcatgcagcatcgcgccgctgacttcaccggtgtaggcaccggcgtcttcccaaaacatattctgtgcaccgaccttcattaccgtgccgcgaaacgcctcaagcgtgggggcaatcgccggtaaagacgggaatacaaacagctcaacctgaccttgctgcgttgccggatgatggccgacgatttccgctatctgccgcgaccattcgagggtctgctgatagccgaagtacatttttaggctaacgcccagcgtcagttgtggtttcattaaaactgctcctcgtgaggtttaacgttgtccctggcgttgccggtgaacagcggcagcagcgcattaacgatcagtgaaagcgaaaccgcgccggcatcaggcgtgcccaggctcttctcggccaacggccttgcgcgccccactttcgggcgcagattggctgtcgccctggcctgcatctcagcctcctgcgccgcctgctgccaggcgagaccaaactcgtctccgcgcgccacgcaggcactcagggtatcgctgaaaggaacaaggacgtcgaccagcgttttatcgccaaccttcgccttgccaaaatgcatgatgccatctttggccttgctaacgccctcggcgacagtgtgcgcatccgggtatttttcatcgccaattaccgtacccagcgcgttgagcgccagcccccagagtgcccctgaagtacctccggcccggtcggcccaggcgtcggcggcctgttgcaacagcgtgccggcaccggcaccgcgcagctgcatctcggcggctttctcggcggcggcaagcgccccacgctccatgccaattccgtggtcaccgtcaccggcaacggcgtcgatacgccccagctcatcggcatgggtcacaatggtttgcgccagcgtattcaaaacaccgagcaggcactgtgcggcctttttggactccacgctggcaggcggcacagtggtcgccaacgcgacgtcgatttgctgtgcttccagcggttcagcggccctaaccgacccttttctgaacgctggggcatcggcaggcgcgcgccacagtggttccagctcatcgtccagccagaacagcgtcagagaggcacccgccatattaaaactagtcacaaattcgccaacttccgcatctaccgcgacaattccggcttcgtccagtaattgcgcaatacggcgataaaccacaaacagctcttcatacttcaccgagcccagaccgttcaggatgacgccgacgcgctgtcccttggcattggcgatgtcgtctggcagttcgtccagcaggcgtttcaccagcacttcggccagctcgtcggcggtaggaatatcagactcaccgatgcccggttcgccgtgaatccccatccccaaggccattttcccgtgcgggacgctgaacagcggacgatcggctcccggcaacgtacagccgctaaacgccacgccgaacgagcgaatgcgctgattggcaaggcgagcgatgcgagtaacctcttgcagagcatggccctgctcggcggcaaccgacgcagccttgaacaccaccagatcgcccgctacgcctcggcgtttttcacgttcttctttgctggcgctggagatatcgtcagtcaccagcacgatttcacagggaatcccttccgagattaaccggtcacgcgccagcccaaaatgcagcacgtcgcccgcatagttaccaaaagtcagcagcacgccgccgccgttgttggccgcgcgcgcaaccgagcatatttgctgggcagacggcgaggcaaacaggttccccatcgccgcaccgtgtgccagcccttgtccgaccaatcctgcaaacgccggatagtggcccgacccgccgccaatcaccacggcaacgctgccgggttcactgcgtgtgcttctgacaaccccgcctggtacctgccgaacctttgcagcgtgggccgcaacgaatccttcgatcagctcattggcaaacgccgagggtttattgaataaataagtcatctcacttctcctatgccgcctttggcgaattcgggtctttcagtggggttggcagcggcttagccggacgctgagtggcgcgcagcagcaccatcaacagagcagagagcagcatgaatccgccgacgaccatcatcggaaccgtatagctcgaggttgcgtcatgcagcgcaccggtgacatacccggcagagaaaccggccacgttaccgagggtgttaatcagtgcaacggccgcggcggctgaagcgccggaaaggaactgcgttggcagggtccagaaattcggcaacgcggcgaagattgagcaggcggtgatggttatcacggcaatggtggcggccggtgagtccatgtacagcgccagcggcacgcttatcccgccgaccaatgccgggatggcgatatgccaggttttgcagccgcgttttgaggcgtcacgcgaccagaagaacatcaccaccgcggcaatcagataaggaataccggtgatcagacctttttgcaggatgctgaaagtcacgccgaactgctgctggaaaccgccgataatcgtcggcaggaaaaatgccagcgcatagaggccgtagacaaatccgaagtaaatcatgcacagcatccacacgcgaccgctggtgaaggcagctttcagcccctgatggccatgaatatttttcttaccagactcttctttctggagttcggtttcgagccatagccgttcttcggaggtcagccatttcgcgtctttaggtttatccaccagataaaaccacgccacgatacccgccaaaatggccggaatcgagacgccgaggaacatcacccgccagcctgccagaccaaacagtccatgctggttgatgagccatgctgccagcggtgcgccgaataccacggttaacggttgtgcgaggtaaaacagagcaagaattttgctgcgatagcgtgcaggaacccaggcgctgaggaaaaagatagcaccagggaagaaacccgcttcggccacgccgagcagcaggcgcagtccgtaaagtccctgaacgctgctcacccaggtaaacagcagagagacgataccccaagacaccataatgcgtgccagccagcgacgagcgccgtagcggtgcagcgccagattgctcgggacttcaagcaggatataaccgataaagaaaacgccagaggccagaccaaactgagccacctggatccccagatcgctaatcatgccgttcgggcctgcaaaggaaatggcggtgcggtcaaggaagttaataaagaacatcagcgccacgaacggcactaaacgcaagcaaatcttgcggatagccgacttctcggcggcccctggtattgttggtgaaatcgttatcatttttctgactccttctgcccttaggcaggcaaagctttatctgagaagcgcctggctcgcattgttcattaattcattatgtgaacatatgaacactacccccttcatgtgaacttgcctatctcgccgtgttaaaagtgtgacgcgactcaaaaaggcgttcaaaaccccttaactcagagtttactcaggtttttgttcaatacatttacttcgcagacgatgatttagatcattcatcacaaaacaaatgaacacctattgaacatatgattgaatttgcgatattgtgcctttactcgctgcgcgctgctgaaaagcaccggctgtcacagcgcgggattggacgtcgcgttagatgccctgaagcccttcaccagtcataacctattaattaggcaggagaaattatgttacctatcgcgattggagccgatgatgcggctattgaattgaaaaacatcgtgaaagcttttgttcagcagcaaggaatagaagtcgtcgattacagtcaggatgccaataacccgctttatccggatattgccttcaccgtggcaacggctattaaagaaggaaaatttgagcgcggcattttgctctgcggtaccggcatcgggatgagcatcgtggccaacaaggttcccggcattcgcgccgctcagtgccacgacacctattcggccgagcgcgcccgcaagagcaacgatgcgcaggtgataacccttggcgcgcgcgtgatcgggccggaattagcaaaatcgatcgttgccgcctggctggcctcgaacttcgagggcggcggctctaccagcaaagttgagaaaattggctattatgaaggattgaagaacgcgtaatatttctgcattcagcgggccccaaccgtttgtcctttatggggtccgccgacaggtaattataacctgttgaattctaaagccatagttctggcccatcacaacaatcagaaaaagcgcattcaatgtgttaataaaatgatgcagtctatgtactctaattaaaacgtaacgacattttgctgtatcgattcttcttaaggagctagagatgaaccagttagacgcacttaaacagctaacgaccgtagtagcggacagcggcgacatcgaatccattcgccattttgaacctcaagacgctaccaccaacccttcgctgattctcaaagctgccgacatccctcaataccaacctcttatcaaagaagcccttgaatacgcccgcaagcaaggcggaagcaaggaaacgcaaattatcaatgcgtcggacaaactggccgtgaacatcggtctcgagatccttaaaagcgttccgggccgtatctctaccgaagtcgatgcccgtctgtcgttcgaccgcggcatgtgcgtagcgaaagcacgtaagcttatcggcatgtatgccgatcatggcattgataaatcgcgtattctgatcaagcttgcctcgacctgggaaggcatcaaagcggctgaagagctggaaaaagaaggcatcaactgtaacctgacgctgctattttcctttgctcaggcccgcgcctgtgctgaagccggcgtttatctaatttctcctttcgtgggccgtatctacgactggtacaaagccaaagagccaaacgcagcctacgacgtggcgaaagatccgggcgtgaagtccgtgaccgacatctacaagtactataaagaacaccgctatcagaccgtgatcatgggtgccagcttccgtaaagttgagcagatcctggctctggccggttgcgatcgtctgactatttccccgaacctgctggaagaactgaaaaatgccaccggtccggttgaacgtaaattaaccccgtctaccgaagcattccatcagccagcgccattggccgaagaagagtttcgctggcagcataaccaagacccaatggcggttgagaagctgtctgaaggcattcgtttgttcgctgtcgaccagcagaagctggaagatatgctgtccgctcaactgtaattaactggagtagaacatgtcctctcgtaaagagcttgcgaacgctatccgcgcactcagcatggacgccgtgcagaaagcgaattccggccaccctggtgcccctatgggcatggccgacatcgccgaagtcctgtggcgtgattacctgaaccacaacccgaccaacccacactgggccgaccgcgaccgcttcgtgctgtcaaacggtcacgggtcgatgctgatttacagcctgcttcacctcaccggctatgacttgcctatcaccgagttggaaaacttccgtcagctgcactccaagaccccaggtcacccggagtacggctacaccccaggcattgaaaccaccaccggcccgctgggtcagggtattgcgaacgccgtgggctttgcgattgcagaacgcaccctggcggcgcagttcaaccgtgaaaaccacgatatcgtcaaccaccacacctacgccttcctgggcgacggctgtatgatggaaggtatctcgcacgaagcctgttcactcgccggtaccatgaagctcggcaaactgaccgcgttctacgatgacaacggcatctccatcgacggccacgtagaaggctggttcaccgacgataccgcggcacgttttgaagcctatggctggcatgtgatccgccacgttgatggtcacaacccagaggctattaaggcggctatcgaagaatcccacaaggtgactgataagccgacactgatcctgtgcaaaaccatcatcggtttcggttcaccgaacaaggccggtacacatgaagtgcacggcgctgcgctgggtgcagacgaagtcgcggcaacccgtaaagcgattggctggaactatccaccatttgaaattccacaggatatctacgcccagtgggacgcgaaagaagccggtaaagcaaaagaagccgcgtggaacgacaagttcgccgcctatgcgaaagcgcatccagaactggctgccgagttcgaacgtcgcgtgaatggcaagctgccaaccgactggcaggctgaatcgcagaaattcattgaaggtttgcaggccaagcccgctaacatcgccagccgtaaagcctcgcaaaatacgctggaagctttcggtaagatcctaccggaattcctgggcggctccgctgacctggcaccgagcaacctgaccatgtggtctggctcgaagtccatcggtgaggatttggccggtaactacattcactacggcgtgcgcgagttcggcatgaccgcgatcagcaacggtattgcgctgcacggcggtttcctgccttacaccgcaaccttcctgatgttcgtggaatacgcgcgtaacgccgtacgtatggccgcgctgatgaaaatccgcaacatcttcgtttacacccacgactctatcggtctgggcgaagacggcccgacgcaccagccggttgaacagctggccagcctgcgtgtgaccccgaacatgagcctgtggcgtccagccgaccaggttgagtccgcggtagcgtggaaatacgctatcgagcgcaacgacggtccgacgaccctgatcttctcccgtcagaacctgacccagcaaccgcgtaccgccgagcagctggcgaacgtggcgcgcgggggtatatcctgaaggacagcgaaggtacgccagaggttatcctgattgcgaccggttctgaagtgggtatcactgtagaagcggccgacaagctggccgcggcgggcaccaaagtgcgcgtggtctctctgccgtccaccgacgcgttcgacaagcaggacgccgcttaccgcgaatcagtgctgccgaaagccgtttccgcgcgcgttgcggttgaggcgggtatcgcggactactggtacaaatacgttggcctgaacggcgcaatcgtcggtatgaccaccttcggtgagtcagcgcctgcggacctgctgtttaaagagttcgggttcacggtggataatattgttgcgaaggcgcaatcccttcttaagtaattactttttattgcaaaattgctttttaaggcagtgataaaggcctcggtgaaaaccggggctttttttgtgctgggcgcacggcctggggggacggcggtgatcgggcggctgcctaacctgccttgaggtcaacgccctttaactccgaggcgcttttccgatttgaaaaacacaaagaattttggtctgaccgtgcgtggatttgaccgcaaggttgccggtttttatttaagaggattgttggcggattcggggctgcgccgggcgaagcgtgacgagacgcatttggctcggaaccgcgaagcggcgcggcctacgccacgtgcgcaagcatctgaaacaaactcatcggctggcaagacacatgcaaaaataacaaggcgtgggttccaaggggccttggcctgggaaggcccttggctggtctgggccagcgcccagcgtgcaaggcacgtgcttttgaccttaaagacaaagcgcgtgcttttgaccttaaagacgttgagatcttaaaaccttgacccaaaaagcgcctctgggtcgcaacccagaaatccccccgtatttactgggatctcgtcacccacagcaccggccactggccactcttactgtatccgtcacagcttggctctgacgcatacgccgcaaggcggaaggctttgccgtcaaatagccaacgtgaggacacaccgcagtcgccgagtcctctgcccttgtcaaagatggagaggataccggtcttctcgtcaaaatcggcgttgatcaactccggcggctggtcgtcgtcacccgatttgaacggcatgttcagtaccagattgtctgacttatacggtgcctgacgcgacacgatatagcccagcacataaaggttataggccccatatcgcaattcaccgtcattagcgccttttcattgctgagcgggaacaggtgaacctcgcgttcggagggatcgaggctacagtcgttattctcgatattggtcgcagtattttgcgtaatggccgagatttctccgtcagtcagcggatgcggctcgttgaaatgcggtagcaaaggcgcggcaggcgcaggcggtaccgtagaggccgctttgttgccccggctggcccaggcggttttggtgccttcgcgcgactgctgctggtcaatggctaacagcgcagcctttaaaccattcagtgagatgctcgggcgcgtgctctgctgagagtccagcttgccgctcagctgaatgctactgccgtcgcggattgaattgacgaattcgttcaccaccacccggttgatgctggcaatatgcttcttgctcacgtcccattcgcggcggttaaaattgagcgttttgccgttaagcgtcaagcggttggctatcgcaatatccgaactctgctcgtcactgttgcgttgataatcgatactgacgctggcccgtccttccggtccggcatcgcgagtgagttgcagcacaagtccctggctgtcctgcgagcttctcgcagagcagtggttcaggttgtcgcaactgacctgccaatcgttgtaaattcgctgcagcggatcagcgtgaacgtagccggtcatcaaggttgccattaacagcagcggcgtagccatccaattgggtatcattacatttaagctcttttacgaagtaaacctttagatattaacctaagctgtgcaaagactctgcccgaaaagcatcatttttttaccagtaaatagaaatggatagacttgattacgtcataaaaagcctcaaacattgtggtaaagcagtgaaatagtttcacagatgaggtaataaacacgttttgttgcggtgttatacgcttaagaacaccctaagctgatattctatccgttagcatcggtcatattttcaaaaggtatatttagggatggcgaaaggtaacgactttagtttactgacaataaaaacaaagataatcctgcttatgctctctctgctgtctgcctcagccatggcggaagaacctcccgttgtgctgacaggaaccattggccgctccgccgtggtcatggaactcgacctcaacaagcctgaagccattacgggacgttatttctacgagaaatatcatcttgacctgccgctaaacggcacagaagaagacggtgagctgagtttgcaggaaggtaccgacgactttaacgatacgccgcgcccgactctcagattacagtcagacggaaaatcaggctggcagggaacctggtctaatcctcagggaaaaatcatgccgatagagttgaccccggcgcagttacccgaaacaaatgcagatcctttcctgaccaagctcatccacgactctccttacgaatatctacgcctgagcaatctacagctggagaaaggcaaagagcagacttttatggattatccgttgcagtggtggcatgaaccgcagtccggcgtgtctttgttcaccctcgcctctgggtatcccgaggctcaactcaaagaaatcaaccagcgtctgatggccagactgtggcaggaagtgattgattatcatagctgtatgctcggtgcaagccagtttggcagcggtgaatttgaacagagcgtgaccccggagctactctcatcgacggtggtcagcgttaagatttccaccagctacagctgcggcggcgcgcatccggactttggtgactccccgcttaatctcaatgctaaaacgggcgcaccgctgtcgctggaagatattttgtggattggcaaagagaagccctttcactacatgtacgccgaagatcatgacgaacgtggcaataatggcgtcagttttgacgattactcgacctatcgtgaaaagaattttgccccgtggctgatttcacagtttaaacagctttatccgagcgagatgcaaaaacctaagggtaacgatgactgtgactatagtgatgctgaaatctggtattacccgtcgtggtatttaaccccaaggggatccattttgggccgtcgtttgcacgtgcgatgcgcgactgcgaaggaaccagctggtctgtgctgccttgggcggtgcgaacccagcatcagggggcgttccgcttaccctgccacaataacgtcgcgattctacctctgaccgaggcccaagcggcctgcggtcagagccggtctcaatccagcagtccgttaatcttcgcgtattgcagcagaatgaccgcttttccatctttaatttcgccgtttttaaccatctccagcgcctgggtaaacggcacttccagcacctcgatgtcttcgtcctccacgccaccgccgtggttactgcggctttcctcgtcatactcggcggcaaagaagtgaatcaactcggtcacgccaccgggagacatatacagctcgaacagcttctccacctcacgaacctgaaaaccagtctcttcgatagcctctttacggatgcagtcctcgggtgagtcctcgtcgagcagcccagcgcaggtctcgatcagcatgccgtgattattatcgttgagataggttggaatgcggaactgcttaaccagcagcacgctttgtttagggcggttgtaaagcaaaatagtggcaccattgccgcgatcgtaaacttcgcgcttatggcggactgtgcttccatctttcctgactaaatcataggtgtagttgcgcagcgtgaaccaattgtctgagagcagtttgttattgatgatttcaattttagcggacatatcgcctctgattaagttacaacaatttactcatcgtaaaatgcaggtaaaaaatgagaaagaatagttaggtaccaatgttcctaacattgataaaaattgcataggcagtatgctcatagggatggatgaaagtagcatgcaaaatggagcagtcgcatggcagaccaaaatttcccctattcagaaaaatcgttaaccgttttcccctcctcagtaggcggcgtctcgtcgcagcacacgtcgctgagtcacccggctatcgcaacggcgtctgccaaaaattacagcgtgatgattgttgacgatcacccgctgatgatccgcgccgtagagcagctgttgagcaaatcaccccgcctgcacgtggtcgccaaggccaacagcggcgaagaggcgctggccgcggcccgtatggccgacatcgacgcgatcgttctcgatttaaacatgcgcggcatgtccggtcttgaaacactggtcgcactgcgtgctgaaggctgtcgggccaaaatcattatcctgacggtgtccgattccccttgcgatatcgccaacctgatcaacgcaggcgcggacgcctatctgctgaaagacagcgaacctgaagacttgctcgagcaaatcctgttaacggctgacggcaataacttcctcagcgaggatatccaaaattccctcgatgaggaaaacaataaaaccaacccgctggaaaaactgaccgatcgcgaaacctgcgtgctgaatgaggttgccaaaggccagtcaaataaagaggtggcgcgcgaactggctatctcggaagaaacggtaaaggtccatattcgcaatgttttgagaaagctcgacgtgcgttcacgcgtcgcggcaaccgtgatgtttctggaaaacagggcataagacacgctttactcgatagccccaataatctgctggcggtgactgtcaatccactgcggatttaacggcccccagctttcaatctgatagtaaccgtcgttattacggactccctgctgaacgaaggccagctccaggcccattcccggcagagcttttagtacgtcctgtaacgtgcgacggggccagccgctgagcgccatcagtttgggtacgttagggcgttcattatttgcaatcagccagcacaggtagagccgacgggcgaaaactgaattcagcataggttccctctttgcatctctaacatgtaaataaattgttactttctaaaatagcgcagtcgcggtaggccacaaaagcgctaacctcaatatcttcatgtcttttttacaccatctcctttttttctccacgttttctatggctattacaggtaaagtgcttgagcgtagaggttgatttcaccccctaacgcaacatcaattcgctaacgagtgttgcaaaaaattgcacaacgtttgaaaccgatgacataaaaataggctaatttattaatctttcctgatgttaatcacgcacggccttattaatcgagatgcgcgtggtaacgaggttttgacatggctaacttttttatcgatcgcccaatttttgcctgggtgctggcgatcattatctctctggcggggatgctttcaatccacagtctgccggttgaacaatatcctgcgcttgcgcctcccaacgtgcgcatcaccgcccagtatcctggggcctctgcgtcaattgttgaaaatactgtcacccagatcatcgagcaaaacatgacgggcctcgacaacctgatgtacatgtcgtcgcagagtagtaacgatggcaagtcacagattacgctaagttttgaagccggaactgaccctaacgaggctctccaacaggtacaaaaccaactacagcaggcgttgaagcgtctgccgcaaacggtgcagactcagggcgtgaccgtgtcgaaaaccggtgataccaacctgatgatggtggccttcgtctccaccgacggcagcatgagcaagcaggatatctccgactatgttgcctcgaatattcaggacccgatcagccgcgtgagcggagtgggtaccatcaacgcctatggtacccagtatgcgatgcgcatctggctcgatccgaacaagctcaacaactacaatctcactaccgccgacgtcgtcactgccattgaaaaccagaacagtcaggtggcagtcggccaactcggcggcacgccagcggtcgatcagcaggccctgaacgccacggtcaacgcgcagtcgcagctgcaaacgccgcagcagttccgggatattacgctgcgcgtcaacgctgacggttctgacgtaaccctcgggcaggttgcgaccgtcgggctcggcgcagagaactacaacttcgacagtcgctacaacggccaacccgcctcggggatgggcgtacagctcgcctcaggcgctaacgaagtgcagactgacacgctggttcgcgccaagataaaagagctatcgcagtatttcccgcacggtctgaaaaccgaaattgcctacgaaaccacgccttttgttaaagcggctatcaccgacgtggtgaaaacgctgtttgaagcaatagtcctggtgttcctggtcatgtacctgtttctgcaaaatttccgcgccacgcttatcccgacaatcgcggtaccggtcgtactgctcggcaccttcgtggtgctgcatcagttcggctacagtatcaacacgctgacgatgttcgcgatggtgctggctatcgggcttctggtcgatgacgccatcgtggtggtcgaaaacgtcgaacgggtaatgagtgaagaggggctggcgccacgagaagccacccgcaagtcgatggggcaaatccagagtgcgctggtggggattaccatggtgctgtccgccgtttttgtgccaatggccttcttcggtggtacgaccggtgccatctatcgccagttctcggtgacgattgtcgccgcgatggtactttcggtattcgtcgcccttactctcacgcccgcgctgtgctccactattctgaagccaatcccgcagggacttcaccacagcaagcgcggtttctttggctggtttaaccggatgtttgacaagaatactcgtcgctacgagcgtggcgtcgggcgcatcctccatcacggtttccgctatatgctggtatatctgctgctggttatcgcgctcggctttatgttcgtcaagctgccaacctcgttcctgccgcaggaagaccgtggcgtgttcaccgtgcaaattcagctgccgccgggtgcgaccctgcagcaaaccaccaatgtggtctcacgcgtcgagcagtacttcctgaccaaagagaagaaagacgtgctgtcggtgttctcaaccctgggttcgggaccgggcggtaacggccaaaacgtggcgcgtatgttcgtccgtctggccgactgggacgaccgtacctccggcaagaatacctcattcgatatcatcgacagggcgaccaaggagttcagcaagaataaatacaatgacgcacgcattatcgccagcagcccgccgtcgattaacggtctcggtaactcctccggtttcgatatggagcttgaggaccacgcgggtctcggccacgccaagctcatggcggcgcgagattcgctgctcgacatggcggcaaagagtccgctgctctcacgcgtgcgccacaatggcctcgacgatagcccacagctgcaaatcgatatcgaccaacacaaggcgcaggcgttgggtctgagcatcgctgatatcaacagcacgctcagcaccgcctggggctcgacctacgtgaatgacttcgttgaccgtggccgcgttaaaaagtttacgtgcaggccgacgcgccgttccgcatgctgcctgacgacgtgaacaaatggtttgtacgcaactcggcgggcaccatggtgccgttctcggccttcaccacctcacattgggaaacgggttcgccgcgtctggaacgttacaatggcagctcgtcgctcgagattgtcggcgaggcggccaacggcgtcagcagcggtgcttcgatggacgaaatggaaaggctggtcgctaaactgccttccggcattggtctggaatggaccgggatgtcgtatcaggagcgtctgtcaggctctcaggcccctgccctgtatgcgatttcgctgctagtggtgttcctgtgtctggctgcgctgtatgagagctggtcaattccgttctcggttatgctggtcgtgccgctcggggtgatcggcgcggttatcgcgacttatctgcgcgggctggaaaacgacgtttatttccaggtcgggatgctgaccatcatcggtctgtcggccaagaacgccattcttatcgtcgaatttgccaacgacctcaacgtgcgcggcaaggcgctgcttgaggcaacgctggaagcctcaagaatgcgtttgcgccctatcctgatgacctcgctggcgtttatcttcggcgtactgccgatggcgaccagtcaaggtgcaggctccggcagtcagcatgcggtcggtaccggcgttatcggtgggatgatttcggccacggtgctggccgtgttcttcgtaccgctgttcttcgtgctggtgcgccgccgtttcccgggaaaggcgaacaaccgaccttgattaacgagattatcgacaccgcaccagaatcctgagatttattaaagggataattagctcgacatgattaattgcctcagccgagacaattaataaaaatgaaaaaggcgctaagaatattagcgccttttattattgaacgattctcagtgagattatttatttacttcccttggcaggtaaaataaaaagttacacataacgttctcatcacctgcttgttgtattttaaacaactctttaaaagcaagtcttatacaagatgatgatgtttatatcgggttcccacgggtgaaaactgatgcaacgacaggatcttgttattatctttatcacggcagtctgcggttattagccacgcagcattgcgtcaataaagtctttccagttcactaattcttgctcgaccattttactccccttgattaacgctgggattatacgagcaatatttgagcagacaaacagtttattccgataatgaaacggcgatcacgcaattcaaaccggtaatggaatcgtgctgcgtaattaattacgccgaattatcagcttagcggcacattgcctggaagtagccgaaaggttaatctttgatgaataagaattaaccgataaccttgagggaataataaccatgagctttaagatttacagtaatgacagcattggttcggtcgactggcagcgtctggccgatattctggagctgagcggacttaataaacgcgacctacagagtctgcaacgtggattcgaacacagccagtttcgctacctcggctactgcgacggtaaactgattgccaccgcacgggcgattagcgatcttacctcggcgtcttatctcagcgacgtggccattcatccagactaccaggggcgcggcttcggcaaactccttatgcagcgcatcatgcaagacctcgcgccgttcggtaaagtcatcatctatgcggtgcccgataaaatcgaattctataaacgctttagctttcacccgctgctgaccgccatgacctatgccgaaggcgatgcactgacgcgccttagcagcaatggctacattccgccgttagcgtgaagagtcatggggatggatcctgaagatgttttacagcattatgtaagcatcatttttttgggccaaaaacgctgtcagaatgcggcttacggctcaaaattggctattttctcgtctgatttgttgccttaatctgacgatttcacatttagggtacgtttgcacatggcagagacatcctcatttatcctctacggcatcaaaaattgcgataccgttaaaaaagcgcgccgctggctggaagaaaatcacgttgacgcacgctttcatgattatcgcgttgacgggctcgatgagtcactgattcagtcacttatcgataaacagggttgggaagcgctgctcaatacgcgcggtactacctggcgtaagcttgacgaatccgtgcgcactgcctgtgataatgtcgaggccgccaaggccgtgatgctggaacatcccgccgttattaaacgccctttcctgcttgccgccagcggacaatcgctgcttggcttcaaacctgaaagctatgcgcaatttgttgcagaggtgaagtaaatgatttgtccggttttagatcttgcacagcagcttatccgccgcccgtccctcagccccgatgacgccggctgtcaggagatcctgattgcccgcctaaaggccatcggtttccacatcgagccgatgaactttggcgacacgcttaatttctgggccacgcgcggcgaaggcaagacgctggcgtttgccggtcacaccgacgtcgtgccaaccggtgatcctacgctgtggataaccccaccgttcgaacctgccctgcgcgacggcatgctgtttggccgcggtgccgcagacatgaaaggttcgctggcgtcgatggtggtcgccgcagaacgcttcgtggccgccaatccgaatcatcagggtcgtttggcgtttttgattacctccgatgaagaggccagcgcggtcaacggcaccgtgaaggtggtcgaagcactgatggcgcgcaacgagcgtatggattactgcctggttggcgaaccctcaagcaccacgcgggtgggggatatcgtcaagaatggccgtcgcggctcgatgaccgccaacctgcaaattcacggcgttcagggccacgttgcctatccacatctggccgacaatccggtgcatcgcgccatgcctgcgctgaacgagctggtttccatcgagtgggatcagggcaatgagttcttcccgccgaccagcatgcagattgctaatatcaacgccggtaccggcagcaacaacgtgatcccgggtgagctgtatgtacagttcaacttccgtttcagcaccgagttgaccgacgctaccatcaaacagcgagtgaaggcattgctcgacaagcatcagttgaattacacgctgaactgggtcgtttccggtcagccgttcctgacgccgcgcggcagtctggttgatgcggtgatcaacgcggtgcagcactacagcgaaatcaccccggacctgcaaaccaccggcggcacctctgacggtcgttttatcgcattgatgggagcacaggtcgttgagttaggtccggtcaacgcctcaatccataaaatcaatgaatgcgtccaggcgtcagatttacagctgctggcccgcatgtatcagcgcatcatggagcagttggtcggatgattgaccacgccatgctcaccggccagtcgaccgggcatctgatcgatatcggtggtggccatcgcctgcaacctgaggcagcaagggcgttttccgccctacagaccgcggcgtcgcaggcgggattcaatctgcaacctgccagcacttttcgtgacttcgccagacaattggctatctggaatggcaaattccacggagaacgaccagtattagatagtgacagccgtccggtggatattagccagcttgatgacggcgagcgcggcgaactgatactgcgatggtcggcactgccgggcgcgagccgccaccactggggcagcgagttggatatttatgcgcccgacctgctgcccgaaggtgcaaaacttcagctggaaccctgggaatacgaggaaggcggctatttctttccgttgactcaatggttaacccagaacatggcgtcgtttggcttttacaggccgtttagcgaagataccggcggcgtcgccgttgagccttggcatttaagctaccgtcctctggcgcaagagtgtgaaaaactgctgacgccacaggtgctccaacaggcttggcagcgtcagaatcttggcggccacgcgtgggtactcagtgagctcgagcgcatctttgcccagtatgttcaaacgagtaaaagcagtcagtaaaagggccgcagcaatgcagtaacgtgttctagaaaaacacattaaccagtaagggagtcatattatggaatggattaaagattactggtggatagtgctgatcgttctggccggcatcatcatcagcggcattaaagaattgaatcgggttgatgtcaaagcctatctgaaggataaaccggagatcccaccgcatcgcgataacaacgccgaatgggacgatgacgacgactggccaaaggacaaaaaaaagtaaccgtcgcgtattaacttttaaccctacctctaacacgtcaaacctgcggcaggtatcagcctgccgcgccttcaacgaaacgttaatccgcctttagtctgctaatcgccgcatcaatcatctgtggactgataccgtgtgccactttaggggcaagatccaaagtgcaggcattgcccagctcttgcagcctctctgctgcgatgacggcgttattcgccgcgatcaccgggtcgctttggccgtggataaaatgaatttttgtctcagcaccgatagcggtctccggcaaactggcaaaacgaccgctgaaagagacgatgcggccggcaagattctgctcaaccttggtggactcgagcgacataatggatccctgcgagaagccgatcaacacggtatcggcgggttttacgccgcttctctgctgccagtcgcgcacggttttaacaaacagcggcatcgattcggcgatacgctgatggcgattatgctcggtcacgccttgcacggagaaccactgacgcccctgcccaaggtcgcaggcgaacggactgccgatgctgactatcagcgcatgaggaaaactggcgataaaataacgcccaatttcgcccattgaaacgggattgtcacccacgccgtggaaaagtaataccagctgttccgcctgcccctgcggctgttgaacgacaacgttttccggactcataacgcaaactcctgtgactttctaaatgtttacagccggaaaataccggttgccaatgccttaactatacgcggctgctcattcaggaaaaccgggttttattgaataagtcgtactgattttttcaatctgcgggtgcgttctttttatcgattggaataggctgcgtgatagctgatgcggagcgtacctttcttgaccttggcggacttgaggaagaaatcggtgatttcgctgatattttcaacgtgcgtgccgccgcacagaatcggctcggtgttttcaatcagcgtgaggcgagtctcaccttccatccaggcggtgaccgccgcgcccgcgcgcagtctggcgtgaatgtccttttgtatctcgacaataggtaattcttcgaccggcacggcttcatcgcccatcctcgagaactccacgcgtgactctccaggaaaatggtgacccgaggtagccagccagccgtaaggcttcagcacgatattcatcaggtgtccggcggtgtgcagtgcggcattttgcaggcgttcggtcgcggaaatcgccgttctcagcgtggcgttttgctcaaactgcaacggctcctgcggatagaccaccacctggccggacggatgcttgcgcacctttaccggaatatcgttcacccagccagtgtcggcaggctgcccgccgccctgcggatgaaagatgttctgctccaacgctatccactcaccgtgttcgtcagtgccttgcgcaatggcctgagtgtctagattgaaacaataggtattttgcatataaagcggggtctgattcatgccggttgctccctgttatatttcgttgatgaattaataacatacaaaaggcgcgccagcagaacaaggcgttattcggcaaactgcttcgcgcgggcacagcgagtcgggtcaatgctttgcatcgcccgtcgggtttcctcacgccagcaggcaagcagcgccttcttgccgcttagccgcagcgtactcaccacctcaggcagcgtattcccttgttgcaggatggcgcgcagggccggaagcggctcggtagaccgcgccagcagacgcagcaacgcgctccggctgctgtccagcgaacggctggcaaaggcgaatcccgccagctcgcgccaatcgccatcgtcaagcagcgcgtcttctgcgactgtcttctgaggccagataacctcggccacctcaacggggacctgccgccggttcttcgataaccgccgttttgcctgctggcagaggctttgtccctgcggactgagaggcagcacggccatagccgcaaagcacccgctgctggcctcacgctgaccaccgacgcggactgtctcaaagccacagcgctgccagaagcgccacagcgggtcggtaaaaccaaagctcactgagagaaagtccaggccctgcgcagcggcaaactgctgctgttcgctaacaagcgcctgcgcaacccctctgcgacgctgggccggagacaccgctatgcgggtgattcgtcgcgacagcatcaccgccgcttcagggaatccggcgtgcgccgccaatgactgcgccaccagattgcctctcggcctgcgccttccggcccagatttcatgggctaagtcaggctgcagaccgccctcgtccaccagccagagcgctgccgacagcgcgttgtcgcaatatccggcggcgaacgacataccgggcgcatccatcatccgccgcaggtccagcggcgaagtgcggtaatgcgcgctggtcagcagatgataaaaatctgccaataaatcaggcgactgctcccaggctgcggcatcgaaatttttaacctgaaccggcgctgaggcaccgtttgggcttacggcgctgtagtccggctcgtcgaacagaaggatgtcgtcaagcagccgctctagcggatcctgctgggcccagcggatcggcgctgtgagccgaagatcttgccagtccgttagcgacgcacagaacttcagtaaaaagccccgtccggtgccctcgtatccctgcacggtggtggtcagcaaaacacgggggaaaaaggggataagtctctggagcaacggcgcgggaatagccgccgcctcgtcaataagcaaccagtcggcgttaactgcggcaccgctttcacaatgggcaagcagcgcgtcgggcgcccagaactgcaccgcctcctcccctgctcactgaggcgctgtcccgccgccttgctcggcgcagtcatccagcaggtgccctgccagtgctgcaccagcatgccagcgagggtggattttccccggccacgcgcggcggtcagcacccagataccgtcctcggcctgcaataacttgtcgaggatcgcgcgctgtccgggcgtcggctcgccctgcggcgttgtccaatcgggtgcggaactaagaagttgaggggaaaaagcactgttctggcgccaaagcaacgcctgagtatcggcctcgatagattggcaaaaacggctaataaagcgcggcgtggcaatggcctcagacagttcggtccagcgtatgctgtcggcatccggcaacgtcggccatgcctgccattcgggcaccagcagtatcagccagcttcccgcccgcagcacgccgctgaaggcggccagtgcctcaacgttcaacccttcccgagcatcgaagacgccatgcaggaattcctgccccagcagctgattcaccgcctcgggttttaccctaggtgacgtatcctgctcattagggcttacccacagccagtcgccgctaaaatggcggctaacctgttgtgcggtctgcccgcaccagtcaaactcgccgctcagcaccagaatacgccgcatgccctgacgcaacatctgccgctgacaggcgtctagccgcgaaattatcgtagcgtcagatgcgtcattgtcgatcatctcaggtttttccaaccatcagcgaaagaatgcctgcggcaatcaacggcccgaccggcacgcctttgaagaacgcaacgcccagtacggtgcccaccagaagcccggcaaccagctgcggctgcgtgcccatcagcgtcagaccacgcccaccgagccaggaaacgccaacgcccaccaggatcgcgacaatcgatttccagtgaaagaaggagtgaataagggtgctcgcactgagtttgccgttggcaatcggcaccatcacgccaatagtcagaataatgatgcccagcgtcaggccatatttttcaatccacggaaaaaagtgattgagcggcgtgatgcgcacggtcagcaggaagaacatcgcgattgttacggcagaattgtggctgaggatccctaaaccggcgaacaccagcagaataagcaaggttggatcgagaaaagccataatattcccagaatagtaaaacgcatgacccaaaatctttcacgttgcagccaggcggcaagcaggcgcatcccgggagctgacactcgtcagtgaccggggtaagcatgcgtagccaacaccgctgcggcatgaaagatgaaggataagattatttattattttgacgatggagaccagtcctaccgactggcaaaggtgttgcattgatccattttgcccgagtcgtacccgcgcttgaaccattcatagcgctgcgctgaggtgccgtgggtgaaactgtcggggaccactctcccttgactctgctgttgcagtttgtcatcgccgattgcccttgcggcatccagcgcctgcttcagatcgccgtcctccaggacctgctcttgctgcatagcatgaccccagataccggcaaaacagtcggcctgcagttccatcttgaccgacaggcgattaacctcggtttgtgaggcaccctgctgcatctggcgcaccttgcgctcaatgcccagcaggttttgcacgtgatgcccgacctcatgcgcgacaacatatccctgcgcaaaatcaccgcccgcgccaagcttgtcgcgcagttcctgatagaaggacaagtcgatatacactgtactgtcggcagggcagtagaacggccccatcaccgattgccccgttccacagccggtgcgggttgcgccacggtacatcaccagtttagggtcgcgatagctcatgccgttttgcttaaaaatctgggtccagacgtcttccgtagaagccaggatcacggaagtgaatttggcctgccgatcgtcgttggggctgatagagccagaggtttgccgctgctgatactgcgaagggttctgtgattgaccgccggtgataagcggtgaaaggtcgataccatagtaaccggccaccagtaccacaataacgatgacgataccgcttttgccgcgaatgggaatgcgcatgccgcccaaaccgttgccgccttgcccaccgctttcattgcggcgatcttcaacattgtcgctctccctacgcccttgccaacgcataattcacctccgctgtttttttctaatcctagttaacaaggtgcaggaataccacttgctcagacaagatttgcggggcgaaaaaaagcctcctcggacgacagcgttaagcgggtcatcaacacaaggaggcgtaatcgtttgcgcggtgcggctaaaaaaagattagtctaattttacgccgatacgttttgcgacttcttcgtacgcttcaatcaggccacccaggctttgacggaaacggtctttgtccattttttcaagagactgggtgtcccacaggcggctgccgtctggagagaactcgtcacccagcaccacttcacctttgaacaaaccgaattccagcttgaaatcaaccaggatcagacccgcgtcaccaaagatcttgctcagcacgtcgttagccttgtagctcagctctttcatgcgtgccagattctcttcgttaacccaaccaaaggtcttgcagtaggattcgttgaccattgggtcatgcttggcatcgtctttcaggaacaagtcgaacagcggtggattcagcaccagaccttcttccacacctaaacgcttaaccagtgaacccgcagcacggttacggataacacattcaaccggaaccatatccagctttttcaccagtacttcgttgtctgacagcaaacgttccatttgggtaggaatgcccgcttgttccaacttttccatgatgaaatgattgaatttgttattgatcatgcctttacggtcgaactgctcaatacgttcgccatccagtgctgacgtatcattacggaactccaaaaccagcaggtctgggttttcggtggtatagacggttttcgcctttccgcgatacaactcagctaacttttgcatcttaacttactccagtgatatgacgtgtttggtgatacataacatctaattattcgccaaaaatcggcaaatgcaaaaaggggccggagccccttcgcgtattacttggttactgcactactttggttaaacgccgcctgcatcaccgctaccatcgcgtcgttctgcgactgcgttagcacatgtccatttggatcaatgaattgcaggctactgcggttgttcaggtcacccagctgcagcttatagttgccggagctgagctgcggatccctggcacccagggcgtcccaggcatcgctgctcggcggtgaatatttcacgctcaacgtcccctgcggacggctgctgtcggtcactttcatgcccgctttggccaacgcattcggcagacgatcccagactgggccgtaaggtgcgcgaataatcagcaccggcagaccggtatcatcggcaccgctttgtacgtcgacttcgccgagtttacggttgtcgatacggttttgctcatcctgctgcagacggccaagaccggcagtgatggtgttcagcatctggctggtatagcgctgttgctcaaccgctgaggtaaccggtttgccctgctgggtcagctcgagggttttcaccgacagcgccgtctgataaccctgaggcttcacgctaatctggtaacgtccctgatactggaagtcttcgtctttgcggttccactgcacggtatcggtattcagcgtctgattggcgtcatcacggctggcaatcttgtagccgttctgttcaacaatggtcaccacgtgcgcccacaggccactgccctgcgcgttgctgtcgagcatcacagtcccggtatcgctggtgtattgcgcgcgtgaaccgtcaaggacggccagaggctgcaatggtggacgaatgtccagacctttacctactgcaccctgcaggttaccggctggcacatcataggtcccgttttgcagcggcagaatcataccgtttggcgtttgcagctctttcaacggtgcggctttcagataatcttcattaccgctgacttcacgcttatagcgagaatcattagaacaggccgcgagaagcatgatcagggaaagacccacaacttttgctaccgtcgacttttgaaaacgtggttttgtaaatgaataggtcatcaaatatccctaaaagtgttatccccagcgccgttgacgcgaccacggcaacggctgcgggttatagcaaaccggccttaattagtgcgtcttccactattggacgagcagcatcggtcagcggcgtcattggcagacgcactgtatcggttgctatcaatcccagcgccttacaggcccatttcacagggattgggtttgcttctacaaacaaatgctgatgcaacggcatcaagcgctgatttaaacggcgcgcttcggcaaatttgccttctgctgccagacggcaaagctcaaccatttctgccgccgcgatgttcgcagtaacggaaataacgcccttgccacccagttgcatgaagtccagaccgctgaagtcatcaccgctcaacagaatgaaatcttcatcatcaaccagcacttggatctggctaacgcgacttaagttccccgttgcctctttgcaggcaacaatatttttaatttttgctaaacgcgcgatggtcgcaggcagcatatcgcacccggtgcgagacggtacgttgtagagaatttgcggcagcgcagtgctttcggcaatggctttaaaatgctgatacagaccttcctgagtcggacggttgtagtatggcgtgacagtcaggcagccaacaacgccactattttcaaagcgttgggtcaacgcgatggcttcggcggtagcgtttgcgcccgttccggcaatcaccgggatacggccatctgccagttccaacgtctgcaaaaccacgtctgcgtgctcgtcgtggttcaatgttgcagattcgccggtcgtgcctacggaaacgatcgccgcagtaccactggacacatgataatcaatcagttttttcagactcgcgcggcagacggcacctttgtcgtccatcggcgtaaccagtgcaacaatacttcccgtaaacattgaccttcccctccacaaacaggtcactcatggtacttttgacacatgggcaaagcaagtaaacaacgtgttgtaagcgcctgctaaacggttttttttctgttggtagacaattttgcgacatgaacgatttttcgcacaccgcgggattttagctgtaaggcgtttttacagttgaaatggtttttctgtttgcgatagttttcatgtctgcgatagtaagtcttacaacagggcatgacgggaagagcgattttgtcacaaccacaacaacattatttggttatcaccgcactgggtgccgacaggcctggcatcgtcaataccatcacgcgccaggtgagcagctgcggttgtaatattgaggacagccgactcgccatgcttggcgaggaatttacctttattatgttcctctcgggcagttggaatgccatcacgcttatcgaatctacgctgccgcaaaaaggcgcagagcttgagctgctgattgtgatgaaaagaaccagcgctcatgaacgtccaccgatgccggccaccgtttgggtcaaggttgaagtcaaagactcaccgcatctgattgaacgatttaccgacctgtttgatacgcaccaaatgaacattgccgaacttgcgtcgaaaacaacgccgcctgaaggctctcgtgaggcgcaattatcgattcagattactgctcacagcccggcgaatacggatgcagcaattattgagcaagcgtttcaccagctatgtacagaattgaatgcacaaggcagtattaacgtcatcagttctacccaataggtttcatcacagcattaatggagaagagtaatgagcccactgaaagccggagattctgcgccgcaatttagtttaccggaccaagacggtgaacaaattaatctggccgacttccagggacaaaaagtcctggtctatttttaccctaaggccatgacgccaggctgtaccgttcaagcctgtggcctgcgtgacaacatggatcagctgaaagaggctggcgttgaagtgctggggataagcaccgataaaccggagaaactgtctcgatttgctgaaaaagagctgctgaacttcacgctgttgtcagatgaagatcatcaggtctctcaggcattcggcgtctgggggagaagtctttcatggggaaaacctatgacggcattcaccgcatcagcttcctgcttgacggtaacggtaaagttgaaaaagtctttgatgacttcaagaccagcaaccaccacgacatcgtgctggcttatgtgacgggtcaataatgttttacagccttcccccgcatcagtgcgggggaagatttcttcaccgttcgttctgcgtttcttcaataaaaggctcattcggccaggcgtgataaacggctttcaccagcgtggcgagcggaatagcaaagaatacgccccagaatcccatagcccaccgaagatgaccacggccagaataatgaccagcgggtgcaggttgaccgcctccgagaaaagcagcggaaccaacaggttaccgtccagtccctgcaccaccagataagcaatgataagcgtccagaagtcggtgccaattccccactggaacagcgccactaccactaccggaatactcaccagcatcgcgccaatatacgggataagcaccgacagcccgaccaacaccgccagcagcagcgaatagcgcatgttcaggaagaagaacaccaggtaggtggcaatcccgacgaccaccatctccagcactttgccgcgaatgtagttactgatctgctggtgcatttcggcccacaccttgcccgccaacccactatctcgcggcaatacccggcgcaacgctctgagcatcagctctttgtccttaagcaggaaaaacaccatcagcggcacaataaccagatagatagccagcgtcagcaggcccaccagcgaggccagagaatagcgcaccaccgattcgcccacgccggagattctggcgcgcaggttgtcggtcatcatgtcgagaataccggcatcgaccagcgccggataacgtttgggcaaggtcgcggccagcgtgtaagatcggttgagcatgctcggcaggtcggccatcagattcagcccctgctgccagctcagcggtgcgataacaaacaccagcaccatgacaataccggtaaaaatgaagaacacgatgcacaccgacagagtgcgcgagaaaccgaaactctggagccgcaccgtgggccattcgagcaggtaggccagcacaatcgccaccagcagcggcgcgagaataccgttaaaaaagtagaggatacagaaacccgccaccagaatcgccaacagtgcgatagcctgagggtcggtaaatcggcgacggtaccattgcagtagcatctctagcatcagtgttaactcctaaattttacgccctgccgctgacgcatttgtcgcagatagttcaggcacagtggttccaatgttgtttcgcttcgttacaatagggaaacgtgatgctgccctgaataacccgttctgtcgccgagaccttatcacgtctgaacgacgcaatgtcttttgcaaatccaaaatatgtagtaagcacttgttttaatagaaaatattccatatttaacaaagggtttatggctatgcggctaaaactgaagttgagcacgatggcaacgcgctttgtcaccaccggcctgctggtctcgaccttgagcgccagcctgctgcctctttacgccacagccgacagcgccgacctccttcccgatatgggcaccaccgcaggcggtaccctgactatcgatcaggagttgcagatgggcgattattacgtccgccagctgcgcggcagtgcgccgttgattaccgatccgctgctcgaccagtacgtcaatcagctcggcaatcgcctggtggcgcacgcctattcggtgcgctttccgtttcatttctttatcgtcaataacgatgagctcaatgccttcgccttctttggcggcaacgtggtgctgcattcggcaattttccgtttcaccgataatgaaagcgagctcgcgtcagtactgtcccatgagatttctcacgtcacgcagcgccatcttgcgcgcgccatggaagatcaaaagagcaaatcgcctttgacctgggtcggcgtattggggtctatcctgctggcgatggccagtccagaggccggtatggccggactcaccggcacgatagcgggcacccagcaaggtatgatcagcttcacgcgcgccaacgaagaagaggccgaccgcatcggcctacaggtgctgcaacgctcggggttcgacccggaggcgatgccaaactttctgcaaaagctggccgatcagtcacgttatgcgagtaagccacccgagatgctgctgacccaccctttacccgacagccgcctttcggatgcccgcaaccgcgccaaccagatgccgcgtatcgtggtgcaatcatcagaggatttttactttgccaaggtgcgtatcctcggcatgtatggcacggaagatcatccgctgaccgacgattatctcaaacaactgagcgacggcaatattcgtcagcagagcgccgcacaatatgggcgtgcagtgcagttttataaagcaaaaagttttaatcaggcacgaaacatcctcgaaccgatgctaaaaaaagaccccggcaacgcctggtatctcgatttgctgaccgatatcgacattgaccaaaaacacgtccctcaggcaatagcccgactggaaaaagccaatgcggcaaccagtaaagacgcggtgctacagctcaatatcgccaacgcttatatagaaggcggcgagctagccaaggccagtcgtctactgtaccgctacacttatgctcatccagacgatgtgaacggttgggatctgctgactaagtcggtcgccgaacagggcctgagggcgcaggaactggccgctcgggccgagagtatggcgctggtcggccggttggatcaatcgataagcatgctgagcagcgccagcgcgcagtccaaactcggcagcctggatcaagcgcgctatgatgcccgcatcgatcagctgcgccagctgcaaaaacgttttcagctgtatgagaaaggctgagaagcaataaaggagaagtttatgcaacacgatgtcgcaatttaccacaacccacgctgtagcaagagccgcgaaacgctgaaactgcttgaggagaaaggcatcaagcccaacgttatcctctatctcgagacgccaccgtcgctcgatacgctgaaaaagctacagcatgagctgggcttttcgtcagccagagagatgatgcgcacccaggaagatctgtataaagaattgaagctggggataaaagtctgagcgaggagcagctgttacaggcgattgccgacagtccgcgcctgcttgagcgccctatcgtggtcaagaaaggcaaagcacgccttggacgtccacctgagcaggtgcttgagatcctgtaacgctatcgaccgcgcaatcttgacccgctacagattgagcgtctctttcacaaacgggatggtcagtttccgctgcgcggtaatcgacgctcggtcgagctgatccagcgtcataaacagcgtacgcatttcgcgatccagtcgctttaacaggaaacggcacacgtcttccggtagctcaaaaccacgcagtttggatcgcagctgcaacgcctgaagtttttcttcgtcggagagtggctgaagccgatagatttgcccccagtcgagacgcgacgcgagatccggcaggccgagattaagctggcgaggaggacgatcgcccgtaatgaacagtcgcgtacgccccgtttcaaggatccgattatagaggtggaatactgcggcttcccaggcttcgtcaccggcgatcccttcgatattatcgatacagaccagcgccagttgctccatgccgtctaatacctctggcacaaaataggcgcgtttatcgaggggaacgtaaccgacggcctcaccgcgcagagaaagttcggcgcaggctgcatgcagaagatggctgcgtccaccgccttcacgcgaccagaaataaacgtaagtgccgtgctcctgctgcaacgcagtttgaatagcggagagcagcgaggtgttctcccccggataaaaactggcaaaggtttcgtcgtcgggaagataaagtggcagggaaagctgtgccggtgtattcagaagtacctcaaccataactggcgtggagacccgacctgtctcgataaaaatgtcggaacaaaaatttaatcgatgaattctatcataggatccgcgaagaattgaactttcagcgcgctaaacgctggttaatcaggcgacaggccgggtaaaagagcctttacccggcctgtttagccgattaaaccgacatcagacagacggcggtgcgcgctcgtccggcacgtcgattatctcttcttcgccgcgatagatttcgatcactttaaacagcaggctgaggaatacgccgacgatcgtcgccaacgccatgcctttcagctctgccgcgccgatgtgaatcttcgcgccgctcacgccgatgatgaggataatcgaggtcaggatcaggttttaggcttgctgtaatcaactttagactcgataagcacgcggatccccgatgcgccaatcacgccgtacagcagcagagaaacgccgcccatgaccggcactggcaccgcctgaattgccgcagccagcttgccacagcaggaaagcaggatagccagaaccgccgcgccgccgataacccaggtgctgtaaaccttggtaatcgccattacgccgatgttctcaccgtaggtggtattcggcgtcgaaccgaagaagccggaaatcaccgtcgacagaccgtttgccagcatcgagcggtgcaggcccgggtcacgcagcaaatccttcttgacgatgttggcggtgaccaccagatgcccgacgtgctcggcgataaccaccagcgcggcaggaagaatggtcaggatggcaacccactcgaaacgcggcgtatagaaggttggcagggcaaaccagtgggctttctcgatggcggaaacgtcgacgatgcccatgaagtacgacagcgcatagccgaccagcacaccgataagaatcgggataatcgccaggaagccgcggaaaagcacggagccgagcaccgtgaccgacagcgtcacgatagagataagcacggtggtgctgtcagccgaggtgccctctgccgggagcagacccgccatattggccgccacgccgccagttcaagcccgatcaccgaaacaatcgcgcccatcgccgccggcgggaacatcacgttgatccagccgataccggcctttttaacgataagcgccaccaggcagaacagcaggccacagacgataaagccccccagcgccgcctcataccccatcggcagcaggagcagtaccggtgaaataaacgcgaagctcgagccaagataggcgggaattttacctttacagataaacaggtagagcaaggtgccgatgccattgaacagcagcaccgttgccggattgattttaaacagaatgggcaccagcacggttgcgccaaacatggcaaacagatgctgaagacttaggggatagtttgcaaaagaggcaggcgttcgcttaccccaataacacgacgggtcatggaccgatcctctgtgaaataattaatctcatgattattgcatttctactcgccagactccgggttgcagccagcgcatctgctgcctgaagtatgacgagtaaaaaaaagccgacttctcagtcggctattgcttacttggtaccaaatatcttgtcgcccgcgtctccgaggccaggaatgatgtatcccttgtcattcaatcctttatctacggaggcggtgtacaactcaacgtctggatgcgctttctcaagcgcggcaatcccttccggggccgcaaccagcaccagcaccttaatgctctggcagcccgctttcttaagcaggtcgatggtcgcaatcatcgaccccccggttgccagcatcgggtcaacgaccagcgccagtcgttcttctatattagaagccagcttctggaagtaaggaacaggttgcagggtttcttcatcacggtaaatgccgaccacgctgatgcgtgcgctcggtacgtgctccagcacgccttccatcatgcccagacccgcgcgcaggattggcacaacggtgatctttttacctttgatctgatcaacttcaaccgggccgttccatccttcgatggtcactgtctcggtttcaagatcggcggtcgcttcgtaggtcagtaagctccctacctcagaagccagttcgcgaaagcgtttagtgctgatatcattttcacgcatcagtcccagcttgtgttttaccagcgggtgtttcacttcaacgatcttcattttctttctctcctaaggctgctgaccaaaaaaatcgcgtgattataacgccttttattttcaacgccagcgccaatagactgatgtggatcaatggatttgcgcattagacgttgaatgtcattttttgccgtaatctgagtatagatagagaaacataacgagacccctcgcaaacgtttgcctgcgctgttagaattaggccgctccattttcaacaaccacaaaacgcatacgtcgtggggattccgcagtgaccgaaaagacctctctcagctataaagacgcaggtgtggacatcgatgcaggtaacgcattggtagaccgcattaaaggtgtagtaaaacagactcgtcgtcctgaagtcatgggcggactgggtggttttggtgccctgtgcgcgctgccgcaaaaatatcgtgaacccgtactggtttcggggaccgacggcgttggcactaagctgcgtctggcaatggatttaaaacgccacgataccatcggtatcgatttggtcgcgatgtgtgttaacgacttggttgttcagggcgcagaacccctgttcttcctggactattatgcgacgggcaaactggatgtggataccgcagccagcgtcatcaccggcatcgccgaaggctgtaagcagtctggctgtgcactggtcggtggtgagaccgcagaaatgccgggcatgtaccacggcgatgattacgacgttgcaggtttctgcgtcggcgtggttgaaaaatcagaaattattgacggcagcaaagtgcaggacggcgacgttctggttgcgctggcatcaagtggcccgcactcaaacggctactctctggttcgcaaaattctcgaagtcagcaaggccgatcctttgaccaccgatctggcgggcaaacctctggccgatcacctgcttgagccgaccaaaatctatgtaaaatcaatccttaacctgattgaaaacgtagaagttcacgcgatctgccacctgaccggcggcggcttctgggaaaatatcccacgcgtgctgccagacaacacccaggcgattatcgacgaatcaagctggaaatggccggacgtgttcggctggttgcagcaaaatggtaacgtcagcagccacgaaatgtaccgcacgttcaactgcggcgtgggcatgctggtcgccctgcctgcagaattggcagaacaggccgtgaccctgctcaatgacaacggcgaacaggcctgggttatcggtagcatcaaggcttccgactcagaagaacgcgttatcattaagtaatattcgaagcgacgggtactgagatgaagaggatagtagttctggtttccgggaatggaagcaacctgcaggcggtgattgacgcctgccagcagggaagagtcaacgcaaccctcagtgccgttttcagtaataaagcgtcggcatatggtcttgaacgcgcgcaggcggcggggatccccgccttttcgctcgatccaaaatcctatgcaaaccgtgaggcgtttgacgccgcgcttgccgaagagatcgacgcctatcagcccgatctcgtggttttggccggatacatgcgtatcctcagccatgacttcgtagtgcgttacgcggggcgcatgctgaacatccacccttctctgctgccgaaatatcccggactgcacacccatcaaaaggccatcgacaacaatgatgccgagcatgggacctcagtgcatttcgtaacgcaggagcttgacggtggaccggtgattttgcaggcgaaagtccctgtttttgaagacgataccgctgaagatttaaatcagcgcgtacagactcaggagcacaacatttacccgctggtcatcagctggtttgtggacggacgcttatcgctgcgcgagggacaggcgattctggacgggcaaattttgcctgtcgaagggcacgccgccgactgattctgctgctgttgtatcgagtgtttcttagaaccggcttatggccggtttttttacgcctataaattgtgcaaaaactcggctataatcgcgcctaaactgcacaatttagctttttataatagatagactcccaaaaacagaacattaaggaatcccatgttcagcacctcccgcatcagactccgtccattggaaaaagacgatctggtgtttgtacaccgtcttgataataacgccaacgtcatgcgctactggttcgaagaaccctacgaagcctacgtcgagcttgaagatctctacgctaaacatatccatgaccaaagcgaacgccgctttattaccgaatttgagaacacccgcgtcgggttggtcgaactggttgaaatcaaccacatccaccgccgtgctgagttccagataatcatcgaccccaatcatcaggggcaaggctttgccagcgaagcggcccgtctggcgatggactatgcgttttccgttctcaacctctacaagctctatctgattgttgataaagagaacgaaaaggcgatccacatttataaaaaactgggtttcgaagtcgaagctgagttgagggacgaattcttcgtcaacggcgaatatcgcagcgtgatccgcatgtgtatcttccagcctgagtttttaattcgctataaaaccaaagctgcagaaaaacctgctgttgaagcgctgggtgccggcgttctctaactctcaccgcccttcttttcctgttcccaacatttccaaacgatatggatttgttgggaattatttggactttcttgtcaatctctcgcaataatgcaagaagatactaggccctctcccaaaaggcagcgcaggctcaaaatgcgtcttgatgggccaggtttcaggctaaatgaacggagtgaaaatgggtcaggaaaaactgtacatagacaaggaattgagctggttatcttttaacgagcgagttttgcaggaagcggcagacaagactaatccactgattgaacgaatgcgttttctggggatttattcgaacaatctcgatgagttctataaggtccgctttgccgatttgaagcgccggatactgattagcgaagagcagggttttattggtgcctcgcgccatctgctgaagaaaatccaggccaaggtgatgcgtatcgatcaagagttcgatagcctctataacgacctgctgttggaaatggcacgcaaccaaatatttctaatcaacgagcgccaggtttccgaaaatcagcaagcctggctacgccagtacttcaagcatcatctccgtcagcacattacccctattctggtcaatcaggaaaccaatctggtgcagttcctgaaggacgactacacctatctggcggtagagattattcgcggcgagaagattgactacgcgctgctcgaaatcccgtccgacaaagttccacgtttcgtcaacctgccgccggaagccccgcgccgccgcaaaccgatgattctgctcgacaacattctgcgctactgcctggacgatatcttcaagggtttcttcgactacgacacgctcaacgcctattcaatgaagatgacccgcgacgccgagtatgacttggtgacggagatggagtcgagcctgctcgagctgatgtcgtcgagcctgaagcagcgtttaaccgccgagccggtgcgatttgtttatcagcgcgatatgcccgacgagatggttgagctgctgcgtgaaaaactcggtatctcgaactacgactcagtcatacccggcggtcgttaccacaacttcaaagatttcatcagcttcccgaacgtcggcaaggccaatatggtctatcgcccgatgccgcgcctgcgtcatctgtggtttgacaaattccgtaacgggtttgccgcaattcgccagcaggacgtgctgctctactacccttattacaccttcgaacacgtgctcgaattgctgcgtcaggcggccttcgatcctaacgtgctgtccatcaagataaacatctaccgcgttgctaaagactcgcgcatcatcgagtcgatgatccacgcggctcacaacggcaagaaagtcaccgtggtggttgagctgcaggcgcgctttgatgaagaggccaatattcactgggccaaacgtctgactgaagccggtgtgcacgttattttctccgcgccgggcctgaagattcacgccaaactatttcttatctcccgacgcgaagatgacgaaattgtccgctatgctcatattgggaccggtaatttcaatgaaaaaacggcccgtttgtataccgactattcgctactgaccgccgactcaagaatcaccaatgaagtgcgccgcgtgttcaacttcatcgagaatccgtatcggccggtcacctttgaacatctgatggtttcaccgcaaaactcgcgcagcatgctgtacggccttatcgatcaggaaattgccaatgcgcaggccggtgaaaaagcagggatcactctaaaaatcaataatctggtcgataaaggcctggttgacagactctacgctgcctctaatttcggggtcaaaatccgtctgttgatccgcggtatgtgctctctggtaccgaatctgcccggcgtcagtgaaaacattcaggtcaccagtatcgttgaccggtaccttgaacatgaccgggtctatgtttttgaaaataaaggcgatcggaaggtgtttatttcatccgctgactggatgacgcgaaatatcgattaccgcattgaggttgccgtcgccgtgctcgatcctcgtctgaagcagcgcgtgctggatctgctggcaatccaatttagtgacacggtgaaagcgagaattattgataaagatctcagtaaccgttatgttccacgcggaaatcgtcgcaaagtgcgtgcgcaggtggcgatctatgactatttgcacgcgttcgaaaatgaaaatcaaaaaaccactcactgagcaagcccgatgattttggagccaagacacccatgccgttaaacagcccaatgaccgccaagccacaggaaattgccgctatcgatctgggatcgaacagttttcatatggtgatagcccgcgtcgttaacggcgcacttcaggtattagggcgactgaagcagcgcgtccatctggccgatggcctggacagcaacaacgttctcagtgaggaggctattcagcgtggtctcgactgtcttgcgctgtttgcggaacgtttgcaggggtttcccggcgacaacgtgaccatcgtaggcacacactcactgcgtcaggcagtgaacgccgaagagttcctgcaacgcgccgccgaggttatcccttatccaattgaaattatttccggtcaggaagaagcccgtctgatcttcatgggcgtggaacacacgcagcctgaaaaagggcgcaagctggtcatcgatattggcggcggttcaaccgagctggtcattggtgaagacttcgaacccctgctggccgagagccgccgcatgggctgtgtcagcttcgcgcagctgttcttccgcggcggcgagattaaccgcagcaacttcaagcgtgcgcgcctcgcggcagcgcaaaagctcgagacgctggcatggcagtaccgcctgcagggttggcagtacgcgctaggcgcatcggggacgattaaagcgactcacgaagtgctggtcgagatgggcgaaaaagacgggcttatcaccgccgagcgtctggaaatgctggccgatgaagtgatgaagtacaaaaacttcagcgccctgagcctgccgggactgtcggaagaccgccagtcggtatttgtaccgggtctggccatcctctgcggcgtgttcgatgcgctggctattaaagagctgcgcctctccgacggcgcgctgcgagaaggcgtgctgtatgaaatggaaggccgtttccgtcatcaggatatccgcagccggaccgcgaaaagcctcgccgaccactataacattgaccgcgaacaggctcgtcgcgttctggaaacgacagaaacgctgtacacccaatggctggcgcaaaacccgagtctggcgcagccgcagctcgagtcgctgctcaaatgggcttcgatgctgcatgaggttgggttgggtatcaaccacagcggcatgcatcgccattctgcctatatcctgcagaactcgaacctgccgggcttcactcaggagcagcagacgctgctggcgacgctggttcgcttccagcgcaaggcaatccgccttgatgacctgccgcgcctgaacctgttcaagaaaaagcactacctgccgctgattcagctgctgcgtctaggcgcgttgctcaataaccagcgtcagtccaccacgcagcctgaaaccctgcgtctgcacaccgacgacaaccactggacgctgtgtttccctgccggattcatggcgcagaacaacctggtgctgttagactttgagcgtgaacagaactactggagcgacgtaaccggctggaagctgatgctcgaggaagaagaggcagacgaagaagaagacaagaaagaagagcagaagtaagcgctcttctcctggccgtgcgcggtgccattgatgtggccgtgcacggctgacgcactacggattgacccacgtctcaggcacaagaagctgtgacaaaggctgtcgttgccccacccactcccctgcatataatcgacgcccatctggcgcaatgcctcctgctgttcctcgctatcaacctgttctgccaccaccgccatgcgtttaacccgcgccacctggcagattgaggtaataacgcacttgtctaaggcgtcggtgagcatgtgacggacaaagctgccgtctaccttaatcacatccgcctcgacctgcttcaggcgatcgtaggtagtgtaacctttgccgaagccgtcaagcgcaatacggcaaccaaactggcgcagatttctgaaggccttcatcacgtagctaatatcctgcaacaggcaggactctttcatctccagcaaaatctgataaggctcaacctgatgctgggtcatcagtagcttgaactcctgacaaaatgagggacgataaagcgtagaggatgaaatttttaacgcaattcgcatgctgggcaactgcgctcgttgacggtcgatatacgccagcgcctgcttaatgacccagatatccagctgatagtctaggccaaactcctgcacaacgggcaggaataagtcgtcgggaatcgaccggccatcgttacccaacaggcttggaacaatctcctgataagtatcccccggacgccgttaatcggctgggcaagcagcacaaacctgtcctcgtccaatgcgcgctgaatcaaatgcagcagctcgactttagtttcaatatcggcctgcatctgactgtactcgctctttttatgctccagctcacctgtcaccagtgagacctcggcgatgccgctcagctcgccgagcaggctatgcaaatgcaccacaggcggataaatcaggcaccatgcgaggccaatattgggatgcaccggcagaccgttccagatcaaacggaaatttttgatgcactgctgaagctgttcgagtttgtcttgtgctccttcaggattgaggcgcagaaccagatcgtgccccggtaaatgatagatgccttcatccggttgcaggtagggacgcagagcgaagaccagctgctgtttaaactgaatgcgtaaccgcatgccatagtttttgctcagcacgtccatctgcgccacgcggacgaaacagagcacggagcgcggaaaaagcttcacgtcgcggctaaacgcccgcaggttggccagaccgacaaccggatcgagcaacgctaattgactcaccttgcgcattaaaatacgctcacgagacgcacttgccgagaccagcagcagacacagcgtaaagccaaacatcagagcagaaataaaggtaagatgattaagcagatcgctgttatcaacaaacccctgataatgtttgaataatatgatcagcgctattgaccagaccagcgtaataaaatgatagccatatcgcttcgcacccaacagcataaccggtaataatagggtcagtgtgtaatcacccagcagcatgtcagcaggatcatcatgtaaactgcgggtgcaaagtaaaatcaccagtaacaccagggttgatgcccaaagaataaattcggtgacctgaatatcaaccgcgcgctggcgggtaaatttctgccacagtacgcgccaataagacggcttgcaggcgacgcgcagcagcatataaaaaagatgtccgcacagcgaaataccgagcattattccctgataatttatcaaggtgcgcagcgtcatcacatttttatccgccagccctaaataatcgggcagtcttccgctctcgacaaccatttgcaaaatgataataaatagggtcggcaggatgatgactagccagattagtctggggaaggcatgatacagcaggccgaaggaggcggttgcacgcctgcgggtatgaaagcgatatccagcccaggccagacaaagggcagcaggtagaccagcgtcaaaatgaggcttgtcttagcctcgagatcaaagaagtcgcgtaaaaaaagtgccaaagcgatccccggcagcgcacgccagtcgaatatcatcagcagtgcgacgcaggccgccagcggtaaatacagcaggtaagtgcgcccatcgtccagcaacagcatggcagaaagccaagaggcaagaggaataatggccaaagcacaaagcagggaaattccccaccggcgacaggaagacccgttcggcgttattaactttttactcagtcgggccataatgaattaatcatgtattatagaggtaataatctgttcattttaaatacaagctagcccctccctcttgatgacgatcaataaaaataatttcatttaaattaaataaaatccttagactttttatgtttaaaaaacaaagaactaagattcatcaagctaaggagtaaaattccccttaaaataaatataagggaaaaataaggctgctatttatatatattttaaataccactctctacggtccgttttagctagatgatcctggcattctgctatatattaaacatacattatagagaccattgttttactatttcggagctcatcggcccacttcagatagactaaagaagccactatgcgtaaaaaatacaacatcaagatgaccagaattattctgacgatcagctttattatcctgtttggtcgcctcatctatgccgcgatcgggtcctattcccatcataaaaatcagcagcaggcccagattgaacaatccgtgacacccgtttcgtcacaagactcgtcagaaaaagcgccctaattgttggtcattttgttggtatttcgccccagcaattttgtttacagatagcagaaggactctgaatgtcagcagcaaaaccgcagaaccactctcagaaattggcggaagttcgtcaccatatccttgatttactgcttaataatgatgatttagccgacagtattctcggcgaaaaaaccgcagacccgcgcaacaccttgctgatggaccaaaccgcggatcttagcgccagcgtcgccaccctgcacgccgccgacctcgccgatattcttgaagctctgcctgaacaccagcgtctggcgctgtggagtctggtcgaaccctcggtgcgcggcaaggcgctggtcgaggtttcggaaaccgtatgggacagcctgattgaggagatgagcgacagagacctgctccgcgccatcgcctatctggatctcgacgatcaggtttatctggccgaatacctgccgcgtgacctgaccggccgcgtcctcacctcgctggagccccgcctgcgtgacaaagtccgcgaggtgatgaaattcggcaagagctcggtgggcagaatcatggatttcgagctgttgactattcgcccggacgtcacgcttgccgccgtgcaacgctatctgcgctttcgcaaaatcattcctaaaggcagcgacaaactgttcgtcaccgaccgcaataacctgttgctgggtgaactgccgttgaccaccgtgctgctcaatgcgccgctgcaacgggttgaggaggtcatgaacgacgatccgaccactttcagcccagacgacaaagccgacgacgcggccagcgcttttgaacgatacgacctgataaccgctccggtggtagacctgaaaggcaagctgatgggccgcctgacggtcgagtcgattgttgatttcgttaacgaagattcagacgctaacctgcgccgtatgggcggtatcagcccggaggaagacgtcttttccccggtcggcaaggcggtgaaaaatcgttgggcgtggctcgccattaacctgtgtaccgcctttgttgcctcaagggtgattgggttgtttgagcacacgatttccgagctggtcgcgctggcggcgctgatgcccatcgttgccggtatcggcggcaacaccggtaatcagaccattacgatgatcgtgcgcggactggcgctgcatcaggttcagttaagcaatatgccgttcctgctgttgagggaacttggcgtagccttgataaacgggcttatctggggcggtttgatgggtgtcgtcacctggctgctgtacggcaatatggcgatgggcgcagtcatgacgttagcaatggtgctgaatttactggtggctgcactgatggggtgttgattccgctgacgatggtgcgactcgggcgtgacccggcgctgggctccagcgtgatgattacggcactcactgacaccggcggattctttatcttcctcggactggcgacaatcttcctgctttaattcgcttacaagccgctccctgaaattcagggagcgatgtggtctatcccaacatactcgcagctaactttcccgaacacgcactcagggcggattagccgtgggttttcataccggctgcgaacatcaggatgtggaaggcactggccacgactaaaagggctaaaacgctgccgccgtagataagcactaaccaggaaatctttttccagaaggagacgcttttcgccggaacggttttgtcatccatctgttgaattgtaataagacttttcattcagtcctccaatcttttaaacataaggggcaaggctcgccctgcccctttaatcataacttcactacgttatcagtggtaaccctggtccggcgtgactttgccgcggaacacatggtagccccagaaggtgtagaacaggatgattgggataatgatcagcgcacccaccaggatgaagccctgacttgctggtggcgaagcggcctgccagaaagtgatggacggtggaatgatgtttggccatacgctgatacccaaaccgctataacccaggaataccagtaccagagtcagaataaacggcgagtagtgtgcattacggttaaccgctttcacaataaagaaggacaccagcagaaccaaaacaggcactggcaggaaccagaacaagttaggtgtgctgaaccaacggtgtgcgatgtcggcgtgagtcattggcgtccagatactgacgactgccaatactgcaagcagtacgaacagcagtggcttagccaggtcatgcatacgctgttgcaggctgccttcagttttcaggataagccaggtacaacccagcagagcgtaggcaacaatcaggcccagcccgcagaacacggtaaacggcgtcagccagtccatcgcaccgccagcgtagacgcggttaaccaccggcagaccgtcgatgaaggcgcccagaaccacaccctgacagaaggtcgctattacggaaccccaaatgaaggatttgtcccagatgtgacgcttctcttcgctcgccttgaaacggaactcaaaggcaacaccacggaagatcaggccaaacagcatgatagtcagcggcatggccagcgcgtcaaggatgaccgagtaagccagtgggaacgcaccataaaggcccgcaccacccagcaccagccaggtttcgttgccgtcccaaacaggggcaacggtgttcatcataacgtcacggtcttcgctctttttaacgaacggatacagcagaccaatacctaaatcgaaaccatccataacgacatacatcatgatgccgaatacgataatgacgaaccagatcaacggtaaatcgatacccattatcagctccttaacttaatttttcatctacagcagacagaggacgagctggggtacgttgtttacccgggccaccatcttcatgatgttcgccttcgtgctcctgaggacctttcttgatcagacgcatcatgtagccgtagccgacgccaaatactgagcaatagataacaacaaaggcaatcagggtaatgctcatgtgtacaacaccgtgcgctgaaacagcgtctttggtacgttgcagaccataaacaacccaaggctgacgacccacttcagtggtgatccaacccgccagcagagcaatcagaccagaaggtcccatgcacagcatgaagcgcaggaaggttttgttggtgtaaagggtaccgcgtttacgcatccacagaccgacgaagccagacaggatcatcagcatacccagacccgccatgatgcggaatgtccagaagatgatggtagagtcaggacggtcttctttcgggaatgacttcagcgcagggatctgcttggtcagactgtgcgtcaggatgatgcttccgagatcgggaatttcaatcttgtacttagtctcttcggcggtcatgtcaggccagcctaccagtaccagcggagatggcttgtcatctggattttcccagtggccttcaatcgctgcgattttagcaggttcgtatttcagggtgttcagtccgtgcgcatcgcccaccactgcctgaataggagacacgatcagcgccatccacattgccatggagaacattttacgtgttgcaggcgtgttgtttccgcgcagcaggtggtaagcagcagaagaagccacgaagaatgcagatgccaggaacgccgcaatactcatgtggaacaagcggtacgggaatgacgggttgaaaataactttcagccagtcaactggaacaatcaggccgttaacgatgctataaccctgcggcgtgtgcatgaagctgttcgacgccaggatccagaaggttgagatgatagttcccagagcaaccatgcaggtggagaagaagtgcagaccaggtccaacacgattccaaccaaacagcataacgcccaggaagccagcctccaggaagaacgcggtcagtacttcataggtcaacaggggaccggtgatgttacccgcgaagtcagagaatccactccagttggtaccaaattgataggccatgaccagaccagaaaccacgcccataccgaagtttacggcgaagattttggaccagaaatgatacagatcacgataggaatcttgtttagtttttagccagagcccttcaaggacagccagaaaactcgccaaacctatggtgatcgccgggaaaataatgtgaaacgacactgtaaaggcgaactgggtccttgcaagatccagtgcagttaagccaaacatggcattacctcagattgcatagaaagtttcataagacagacagtcagtttgttcgaaaaaaagtcacagcagtccagatgccaaagcagcacccaataaccaagagactaaaataaaatcaaatttttgtggcgagccacgggtacaacacgatgtctgtaagtataaacgcaggtgatcagttaaaacggtggagcgcggggttgaaactccaactgtttaaagaagctcaacagcggagaatcgaaatgttctctgggtacgaaagcactgagattacccgaccactgaagcattacatttcccaagctaattatagacaactggtcaattaatgcacaatgagagcaaggtaaatcttcatgcaccgagacatcattcgccgacgcgttcaactgcatttgcatgcggctgagttgttctgagattgatgactgatggtccttcataccggttgcaatgactctatttgcccctgatacaaagctcgctaccgaacccgtcgcgacagacgttttcgcagcgcccatactaaagtggtccagagatcgggagatcgctggcgtcagcattaatatgaggatcgcgaagataccccaccacgcaggtgagaaacttcgagaagaattgatcaggattaaagacacattcagcctaatgcagtagagacaatttcggttcgtatgaattgtacgtgtatttctttaaaatgttaaaaaactttcggccactttgtgcggttttttgatttcaaatcctgacgatgtaaataggatttcatttatttaataactgcatccttacagacatcatgggataacatttattaccatcaaatttaacaattgattattctggtttccaattcgggctattccaaataagtaacgtagcgtaacttctccagggtttccaaatttcggcatagcgatttattgttccaggcgtcatatttgggaaccgctgctttattaaatagtcgctgtgtaaaaagaggtctctctcgccccaggcgcgcatagcaatgtagctggcggtccagccgccgatccccggcatcgccagcagctgcttcatccctgccgtgcatcggtaatgccgtagagcggcaactccccgttttctatcgattttgccagattaatcaggcatgccgcacgcttggcctgcacgccgagggcgcgcagcgcatccacttcaagtgctgctacgcgggccggggtgggaaacaagtgcgtcaacgcttcgtagggcgtatcaaccgtctcgccgcacagcctggccagtctggtgcagaaggttgccgccatcttgacgctgaccagctggccaagaatggcgcggaccgcaagctcgaagctgtcgatacagccgggcaagcgcagccccgccgcctcttccgctaatggccccagtgcctgcgcgatggcttgcgggtcagcgtccaaatccagcagattgcgcactcttcgttttaccgtctcgatgtgtggcacgagagaaggagagacctccagctcaacggcgtgcaggctttcccggggccgccaactgagccagccgctgacgcttacatcctcttcctttattgccagcgttcttttatagctgaaaccttcgggcccctggtcgtcaaactgttcaatgcctgcgagcgccctcgccccgagaaaggcggtcatccagccccagtcataaggaggattataaggaaggagatattttgcgttggccaccgggaagtccttaataaatggttaacatcagacagattaataaatgtagcctacgcggcgcgaaggcctgcatcagcgccgtagagtcatcattagctaaagattgtcttagtcaacagcctttaatgaaatatgaccggacgatagggttagagttattcgttaattgtgaatattttgttttatcaagttaaataatataggcggtttatttgagcaatgaaatcatcggcgataaaaaatgccgctaatttgttcgcagctggggtcttttttatccgtcatttgttaacaacccttcttccctctttatctcctacttccttcttgcctgccggcaacgactccggtaaagtcgcccccttctttggcatggggaaccgtgatgtttattggatttgactacggtacggcgaattgctccgtcgccgtgatgcgtgacaacgacgcagagcttttggcgttagaaaatggcgatgcctatttgccttccatgctttgtgcaccgacgcgtgaagcagtcagtgaatgcttgcatcgtcactggcaggtaccaacgggcagcgatgagaatcagcagctgttgcgccgcagcatgagcttcaaccgtgaagaagatattcaggtcaacagcaacagcgtgcacttcggtctacaggcgctggcgacctatatggaagatccggaagacgtttacttcgtgcgatcgccgaagtcgttcctcggggccaacggccttaagccgcagcagatagctctgtttgaagacctggtctgcgccatgatgttccacatcaagcgccaggccgaatcggtggtacagcagaccatcgagcagaccgtgattggtcgcccgatcaacttccagggtatgggtggcgaagaagccaaccgtcaggcgcagggtatccttgaacgtgccgcggcgcgtgccggtttccgcgatgtggccttccagttcgagccggtcgcagcgggtctggactttgaggctacgctgaccgaagacaaaaccgtgctggtggtcgatatcggcggcggtaccaccgactgctccgtgcttttgatgggaccgagctggcgcggcaaggctgagcgtcagcacagcctgctgggccatagcggctgccgcgtaggcggtaacgatctggacatcatgaccgctttcaaacagctgaccccgcagtttggcatgggcagcgaatcacagaaaggcatcgcgatgccgtcattgcccttctggaatgcggttgccaccaacgacgttcccgcgcagcaagatttctacagcgtggcaaacggccgtatgcttcgcgacatgatccgtgatgcagcgaatcccgatcaggttaaacgcctgctgaaggtccaccagcagcgcctgagctaccgtctggtgcgggcggcagaggagagcaagattgcgctgtccgaacgccagagcgttaccgccgcattggactttatcgagtcgggtctggcggaaagcatcagccaacagcagctcagcgaagccatcgcgcagccgctggaacgcattcaggagcaggtcagccttgcgcttgccagcagcgacatcaagccggacgtcatctatctgaccggcggtagtgcgcgctcacctctgttgcgtacagcattgcaggaacagctgccgggtatcccgctggtcgggggcaacgattttggctcggttaccgccggtctggcgcgctgggcgcaaacgctgttccgttaacagcgaccgaccgcctgataaaagaaaagcgccagactcacgtcggcgcttttcttgtttattaaccggctaaccggtcaaaaccaggcattacttccaggcgctggccttatccagagcctcgatgtcgcctttgtcgagtttcaatttggtggccagagagagatcctcaagctgcttcaacgaggtggcactcacgataggcgcggtgatgctcggacgcgcaatcagccaggccagcgaaacctgcgtcggagacgcgcggtgtttctcggaaatttcatccagcgcctgaatgattttgtgcccgcgatcgttaaggtacttttcaaccacaccgccgccgcgcttactcttagtggcgtcttccttgctgcggtatttacccgacaggaatccgctcgccagcgaatagtagttgatcacgccaacgtcattgtcggtcaccactttctccagacctgactcatagtctttgcggtcgtagaggttgtactcgggttgcagcgtctcgtaacgcgccagaccctgctctttggaaactttcagcgcctcggcgaagcgggtcgccgaatagttggagccgccgatggcacgaaccttaccttctttgatcagttcatcgaaagtggccagcgtgtcggctaacggagtgtcttcgtcatctttatgcgcctgatacaggtcgatgtagtccgtttgcagacgcttgagcgagttttcaaccgactgtctaatgtagctcggggacaggcctttttgaccgtcgcccatctccatgcccaccttggtcgccagaacaattttatcgcgcttgccgctcttcttcagccagttaccgatgatggtctccgactcaccgccctgattaccctcggcccagcgagagtatacgtcggcagtatcgataaaattaagttggtgttccaaaagcgcatcaagaacgctgaaagaggtcgattggtcgatagtccagccaaatacgttgccgccaaaggtcagcaaaggaacctggataccggaacgacccaattctcttttactcatcatgctctcctttttctgatgacttactatgaatgaagaatttgattagcctgcaaatcacagtactaaccttagcaccttgagccgataatactcagtcatcatcacccggttttattgtcacagaatgaaagggactccttatttcctccattttttcacccccgggattcgctaaactgtgcaacgatgtgaaggtgatttctgctcgctaaaataaaaaatcaacgaatcagaacgttgaatgaagtccgccaaggaaggcgttaacgtaaaagtccggatttctagggtcgacgcgggtgctctatccgcttatgcttttattctctgtctatttccacgggtattcggtaagccagaaaagctgaatcaacgcagtgagcaataacctcaatttaggcactatttattattgggcacgacaaatcgatgactgaggctacaggaaccaccctacctatttcagtgcgctggcagctatggattgtcgccttcggcttctttatgcagtccctcgacaccaccatcgtcaacaccgccctgccttcgatggccttaagcctcggcgtgaacccgctacacatgcacagcgtggtggttgcctacgtgctcaccgtggcggtgatgctgcccgccagcggctggctggccgacaaggttggcgtcaaatgggtgttcttctcggccatcgtgctgtttaccctcggctcactgctctgcgcgcagtcgaccacgctgcaacagctggtgatgtcgcgcgtgctgcaaggagtcggcggtgcgatgatggtgccggtcgggcggctgacggtactcaagatagtgccacgcagtgaatacatggcggccatgaccttcgtcaccctgcccggacagattggcccgctgatgggcccggcgctcggcggttttctggtgcagtacgccagctggcactggatcttcctgattaacctgcccgtggggctggcaggcgctatcgccacgctcacgctgatgccaaactacaagatgcagacgcggcgcttcgacatcagcggctttgtcatgctggcggtctgcatggcaaccctcacgctggcgctggaaggaaacaaaggcctgggcctttcgccgctgacgctggtcgccctggtcatcgtcggtgcggcggcgctcggcgcttattggctgcacgcgcgcggcaatctctcggcgcttttttcgctgcgcctgtttcacaccaaaaccttttccattgggctaaccggcagtttcctcggccgcatcggcagcggcatgctgccgtttatgacgccggtattcctgcaactgggaatgggctttaccccgttccacgcggggctgatgatgatcccgatggtgctcggcagcatggggatgaaacgtattgtcgtcaggctggtcaataagctcggctatcgccgggcgctggtgagtgccacgctgctgctttctgtaataaccctttgcatgccgctggtcgccatttacggcgcctattggatgatcccagtggtgctgttcttccagggcatggtcaactctctgcgcttctcatcgatgaatacgctgacgctcaaagatttaccgccgcgtcttgccagcagcggtaacagcctgctgtcgatgattatgcagctttccatgagtctgggggtgagcgtagccggcattctgattggcctgtttgcccatcagcagatagaccccggcagcaccgcgatgcaaagcgccttcatttattgctatttctgcatgacgcttatcattgccttcccagcgtggattttcctgcgcgtaccggacgaatcgcaaaccaacgtcatccttgatcgccgccacaacgccacggcctcctccgacccagcgagaaaatcatgaaaccaggtatcaccgccaagctgtttctggccatctttctcaccagcagtctggtgatggtcaccatgaactggggcgttcgaatgagcttcgagcggggcttcatcgactatattcgccacggcaacgagcagcgggtggagatgatcgccgactatcttcagcagcagtacgagcagcacggcaactgggatttcgttaaaaataacgataaagccgtctaccagatgatgcacaccttcgaccagaacgacgaaaacagtcagattttgccaccggtcggctggcggacaaaattctggatactcgacagcagcaatcagcgcatcgccggttccgagtcggatatcccgcccgatttggtcggcaccgggcgacaaatgagggtcaaaggcgagcttattggcaccgtagtctccacccccgccgagcgcctgacccgcaatgccgacatcaactttgaccagcagcagagacgcaccagctggataatcatgggtttcaccacgctgcttgccgccgccgtcacctggctgctctcgcgcggcatgctggcgccggtgaaaaggctggtcaaaggcacccatcagctggccgccggtgatttcagcagccgggtcgaggtgggcactcaggatgaactcggcaagctggcgcaagactttaaccaactggcgatgacgctggaaaaaaatgagcagatgcggcgcgcctttatggccgatatctcgcacgagctgcgcacgccgctggcggtgctgcgcggtgagctcgaggcaatacaggacggcgtgaggaaaatgtcaatggagtcgctggcctcgctacagtccgaggtcgccatcctgaccaagctggttgacgacctctaccagctgtcgctgtccgacgcgggcgcgttggcctaccgcaaggaagagaccgacgccgtgcatctgattcaactggccgaggccgcctttcgcgaacgcttccacgccaagcagctgcatctgaccagcacgctgcccgacaaggcgccgatatttggcgatccgcatcggctttcccaactgtttaataatctgcttgaaaatagcctgcgctatactgattcaggtggcggtctggatattatcgccacccgtcgtgacaagtgcctacaggtttattttcaggacagcgcaccggggctgaacgaagagcagcttctgcggatatttgagcgtttttaccgtacagaaggatcgcgtaaccgcgccagtggcggttccggtctcgggttggctatctgccagaacatcgtcgaggcccacggaggtaaaatcagagccgagcattctccaacgggtggcatcaggattatcctgcagctgccactttcacttcctagcggacaaagaatgtaatgaatgaattcgcccatgcggaagcacaaccgcttaaaattttgatcgttgaagatgaacccaagctcggccaactgctggtggattacctacaggctgcgggctatgccaccgagtggctgaccaacggcaacgacgtggtgccgctggtgcagagcaatccaccgaccatgatcttgcttgacctgatgctgcccggcagcagcgggcttagtatctgccgtgatatccggcagttttctgatattccaatcatgatggtgacggcgaaaaccgaagagatcgaccgcctgctcgggcttgagatcggtgccgatgactatatctgcaaaccttacagcccgcgcgaagtcgtggcacgcgttaaaaccattttgcgtcgctgctaccgcccgaacgaaccgatggccgacggcgtagggctacacatcgacgaaggctgtttccaggcacattatcagggcgttgaactggacctgactcccgctgaattccgcctgctcaagacgctgtcgataaaaccgggctacgtgttcactcgtgaagcgttgctaaacaatctgtacgatgattaccgcgtggtgaccgacaggaccatcgacagccacatcaaaaatcttcgccgcaagctggagtctatcgacggtgacaaggcgtttatccgcgccgtctatggggtaggctaccgatgggaagcagatccttgtcggttaacataagtctgctgcatatgtcacaaattcatctgaaaatctaaagtaacgggtttttcctgcggttgaaaattaaccattggctataatgagtgatggattattcaactactggaggtacctttatggcgacgggtcactatgatcttaaaaagcgaagaacggacagtttcactttaacctgaaggccggtaacggagaagttatccttagcagcgaaatgtacgccagcaaagcgtctgctgagaatggaattacttctgtgcaaatcaatgccgccgacgaaggacaatatgagatcaagcccagtaaagacgggcagcactattttgtgctgcgggcaaaaaatcatcaggtcattggcgtcagtgaaatgtacacagctgcaagtgctgctcaaaagggcatgaagtcggtagtccaaaatggtccgagtacggacattcgcgatctgacgactcatcactagctaaacttgagcaccttggtgtgaaactcggtatgaaatacgacgctgccccgtaaaggcagcgtcaatagttttaaagaagttgatctgcatcattccaaccgcaaatagccttaatcccctacttctcttcgctattttcatcgctacaattccggcctttctccccgcagcgtctatcgtcgcggccctgacctgaaatcagacaatagccatagagactcgccatgttaaccccagaactcctctcgcccgccggtacgctcaagaatatgcgttacgcctttgcctacggtgccgacgccgtgtacgccggtcagccgcgctacagccttcgggtccgcaataacgaattcaatcatcagaatctggcgctcggtatcgccgaagcgcatgcgctgggcaagagattttacgtagtcgtcaacatcgcgccgcacaatgccaagctgaaaacctttctgcgcgatctccagccggtgatcgacatgcagcctgacgcattgatcatgtcagatccgggcctgatcatgatggtgagagaggcttttccacagatggagatacacctgtcggtgcaggccaatgcggtaaactgggcaacggtcaaattctggcagcagatggggctcggccgcgtcattctctctcgtgaactgtcgctggaggagatagccgagatccgcaagcaggttcctgaaatggagcttgaggtgtttgtgcatggcgcgctttgcatggcgtattccggccgttgtctcctttcaggctacatcaataaacgcgatccgaatcaggggacctgcaccaacgcctgccgctgggaatacaaggttcaggaaggcaaagaggatgaggtcggcaatatcgtccaccagcacccgcctgtcgccattaagcaaattgaaacggtcacgccaaccttaggcgcagggcaaccaacggaccgcgtatttatgctcgaggaagccctcaatccgggtgagcacatgagtgcgttcgaagacgagcacggcacctatattatgaactccaaagatttgcgggccatcgaacacgttgccagcctgacgcagatgggcgtgcattcattaaaaattgagggtcgcaccaagtcgttttattactgtgcccgcacggcgcaggtctaccgccgcgccattgacgatgccgtcgccggtaagccctttgacccgacgctgctcaccacgctagaaggcctcgcccatcgcggctacaccgagggttttcttcgtcgtcacgtgcatcaggcgcagcagaattacgactatggtttctccgtcagcaacagacagcagtttgccggcgaattcaccggacaacgcggcagtgggcgtaacgaaggctgggccgaggttgacgtcaaaaatcgtttctcggtcggcgacagcatcgaaatcatgaccccgaaggtaacgtgcagtttttcatacaacagatgcataacaagaaaggggaagacatcgacgtcgcaccgggaaacggccactttgtttatttgccggtgccgcaggaaatgcctttggccttcgcgattctattaaggaatctgctggataatactaatacccgtaatccaaacctttaattaaatcaataaacaccgtttcaatgcggtgtttatttccactttagatgcaaaaactagaatttgatcacaatacggcttcggcctttcgggttaatatatttcccgcagcaagacccgaatggaaaaaaaccgtataaaacagtcaccacctcttcgccggctcaaacacccttgagctggcactattttatttgtaccttatcccgtttttccctcctcattaataattaattaacaccttgctaatttaaaaatatattaatagttaatggctcagctgtttaattactgcgcaattattaccattaatctcaggcctgttggcgcttttccttgaaaattcttatggctattagtaacaataatcatttactttatagccatagactaaattaagcatggagggtgcaatgaaggttcagacacaggcactgctgataatcaatggaaaaggtgccagcaatgaagccctacgcgaggcggtgtacaacctgcgagcagaaggcgtagagcttgccgttcgcgtcacctgggagcacggcgatgccgcacgctacgtgattgaagccattgagctcggcgttgaaacggtgattgccggcggcggtgatggcaccatcaacgaagtcgcgagcgcccttatcacccattcaacggattcgcgccctgccctggggattattccacttggcaccgccaatgactttgccaccagttgcagcatcccaattgagatggatcaggcgctgaagctcgccgttcagggccgtgcgacggatatcgatctggcgcgcgtcaacaacgagcactattttatcaacatggcgaccggcggtttcggcacgcggatcaccaccgaaacgcccgaaaaactcaagtctgcgctgggggcgtttcatactttatccacggcctgttgagaatggataccctcaaagccgaccgctgcgagattactggcccgacttcacatggcaaggcgatgcgctggtcattggcattggcaatggacgtcaggccggcggcggtcaggtgatttgtcccgacgcactgatcaacgacgggctgatacagctccgcctgctgacggcggaagagctgttgccatcgtttctgcgcagcctactgagcgacgaagagaacaagaatattctctcggcctcgctgccgtggttggaaatcaatgcccctcacgatatgacctttaacctcgacggtgaaccgctcaccggaaagcattttcgcatcgacatcctgccaaatgcgctacagtgccgcctgccgccacactgtgcactgctggggtaatccccggcagttttgctttaccgcttccttctgcacgtccccgactgagtgaataacaatcgcgcaacaaactgtgatctcatcctgcaaaaatcgatctgcatacttgtatggtagttagataagggcgtattttttcatcaatgcataacgcctgttctcctgcaaaaggtcttgtctgatgaaaatagttaacgccgaagtgttcgttacctgcccaggtcgcaactttgtgaccctcaaaattaccaccgacgacggcctcaccggcctgggtgatgccacgttgaacggtcgtgaactgcccgtagcctcttatctgaaagaccatgtctgcccgcagctgataggccgcgacgcgcatcagattgaggatatctggcagtttttctacaagggcgcgtactggcgtcgtggccctgtcactatgtcggcgatttcagccgttgacgtggcgctgtgggacatcaaggccaaggccgccaacatgccgctttatcagttgctgggcggcgcatcgcgcaccggcgtgatggtgtactgccacaccaccggccattctgtcgatgaagtgctggaagactatgcgcgccacaaagaagaaggtttcaaggccattcgcgtgcagtgcggcgtaccggggatgaaaaccagctatggcgtcaccaaaggcaaaggcttggcctacgaaccggccaccaaaggcaattggccagaggaacagctgtggtcgactgaaaaatacctcgatttcaccccaaaactgttcgaggcggtgcgtgataaatatggttttaacgagcacctgctgcacgacatgcaccaccgcctgacgccgattgaagccgcgcggttcggcaagagcgtcgaggactatcgcctgttctggatggaggatccgacgccagctgaaaatcaggaatgtttccgactgatccgccagcatacagtcacgccgatcgccgtcggcgaggtctttaacagtatctgggactgtaagcagctgattgaagagcagttgatcgactatatccgcaccactatcacccacgccggtggggtgaccggtatgcgccgcatcgccgacttcgcctcgctgtatcaggtgcgtaccggatcgcacggcccgtcggatctgtcgccggtgtgcatggccgccgcgctgcacttcgacctgtgggtgccgaacttcggcgtgcaggaatacatgggttattccgagcagatgctcgaggtgttcccacataactggaccttcgataacggctacatgcatccgggcgaaaaaccggggataggcatcgaattcgacgagaagctggcggcgaaatatccctacgatccggcgtatctgcccgtcgcaagactggaagacggcacgctgtggagctggtaatcgaatcaacgccttcattgagagcaacatcatgaaaagtattgttattcagcaaccgggtaaactgactatcgagacccgcccgctgctgcaacctgcaccgggagaggtgcgcataaaagtcagctacgccggtatctgcggctcggacgtacacatttttcacggccacaaccccttcgccaaatacccacgggtcatcggccacgagttcttcggccatatagacagcgtgggccaaggcgttgacccggcgcgcatcggcgaacgcgtggtgattgacccggtggtcagctgcggccattgctatccctgctcggtaggtcgtcccaacgtgtgcagcgaattgcaggttatcggtgtacaccgtgatggaggattcagcgactacgccatcgccccggcgcaaaacgcctatcaagtgccgccgtcaattcccgattcactcgccagcatggttgaaccttttactatcgcggccaacatcaccgccttcctgaagccgacgcctcaggataccgccctggtttatggcgcgggcccaatggggctgacggtgattcaggttctcaagggcgtttacggcgtgcagaaggtcattgtgactgaccgcatcgatgaacgcctgcaaatggcacgcgagaacggggcagactgggctatcaacaatcagcatcagtcggtggcagaaccgttggcggtggaaaacatacgcccaacgctggtgattgacgccgcctgtcatccggccattttgcaggaggccatcaacgtcgcctctcctgccgctcgcatcggtatgatggggttctccggcgaggccagcagcatcacgcagcaaagcattaccagtaaagaaatttcactgttctcgtcgcgcctcaacagccatcgttttccgcaggttattgagtggatgtcgcagggcaagcttaatcccgaaaaactggtgacgcactgtatgccaggtgaagagattgaagccgcaatgaccttattcgagaaagatcagcgcgcctgctgcaaagtgctgctcaagttttaatgctttatttatgggcctgaaatttgaggcccatttatttaataccaaaagtcttaaccctgaataccctaattaaaaacctcacgcatcactattaaaataacaccaagtggagctgctcatgtttaagaatctacgctggatcatcgtactcctgctgtgtctggtctacatgataaattacctcgatcgcgttgcactttcgattactgtcccgatgatagagaaagagctgactattaatcccgagcagtttgggatgatatttggcagcttcttcttcggctacgccatatttaatttccttggcggattagcggtcgataaatttggcccgacgttagtcatgggtctcgccgtcgggctgtggtcaatattctgcggcatgaccgccatcgccaccggtttttattcgatgctgattttgcgggtattattcggcatggccgaaggccctatctgcgcatcggcgaataaaatgatcaacggctggtttccgaaaaaacaggccgcgaccgcgatgggcttactcagcgccggatcaccgctcggcggagcagtcgctggcccgattgtcggctatctggcgatttctttcggctggcgtccggcatttatgattatcgcctcaataggtattgtctggatgctggtatggttcttcactgctgccgataatccagaaaaaagtcatcgcgttaccgagcatgagcgccagtgggttaatcggttgaaaaccgagaaaatcaatgacgaagaggacctgacccaatctgcgcagacgctggggtattatctgcgccagcctattattctggtcaccgctttcgccttcttctgctacaactatattctgtttttcttcttaagctggttcccggcgtatctggtgcaggcgcacggcctgaatattaaagagatgagtctgacgacggttattccgtggattgtcggattctttggtctggcactcggcggtattatttccgataaaatatttaacctcaccggccgcctgctgttatcgcgcaaaattgtgttggtcgtcagcctgttggcggcagcgatttgcgtcgcgctggcgggcgtagtgacccgcgtggtaccggcggtaatgctgatgtcggtgtctattttcttcctctacaccaccggcgcaatttattgggcgattattcaggacgtggtgcataaatcgaaagtcggcagcgccagcggctttattcatctcatcggcagcgtgtccggcattattggtccgattgccaccggctttattgtgcaaaataccggtcatttcgacagcgcctttattctggccggtggcgtggcggcgctgggcgcaattctggtgttctttgttatcaaaccaccaaaacatcagccccagacccgtatctctcactcctgagcccattcccccggcctgacggtcggggatacctggagcaccctacaatgacacaggtttcaacctcgtctcaggccgcgatgtctcagcaagaacgttcgctgttaaaacgcgtcgccggagcatcggccatcggcacggccgccgagtactacgacttttttgcctacggaaccgcagccgtgctgttcttcggccagctgttcttcccgagctctgatccgctggtcagcacgctggcggcctttgccacctatgccgtcggatttctggcccgcccgcttggcggtatcgtcttcggccacatcggcgacaaggtcggccgcaagaaggcgctggtcatcaccattttgattgtcgggctgggcaccttctgtatcggcctgctgcccacctatgaaaaaattggcttctgggcgccggtattattgattctgatccgcgtgctgcaaggatttggcgtcggcggcgaacaggcaggcgcggtgctaatgaccgccgaatattcgcgccctgaacgtcgtggattcttcgccagctgggtgcagattggcgcgccgcttggctttttgctgccctcggccctgtttgcggtgctgaactcacagcttagcgccgaacaaatgctggcctggggatggcgcattccgttcctgattagcctgctgctggtgattattggcttgtttatccgcttacgaattgacgaatcaccggttttcgctgaaatccgtaaaaccaaagcggtcgagtcgcggccggttatcgaggtgattcgccgctatcccggcattatcgtcaaaggcgtgtgcgcgaagcttatcgaggcctgcgccttcgcgatgtttaccgttatcgtgctcgccttcggcaaggccaatcacctcagcgccagcgtgctgctcgatacgatgattgttgcggtgattctggaaattatttcgataccgctgatgggtaaactttccgataaagtcggccgcaggccggtttacatggctggtactctgctgctagtgataggtatcgtgcctttctttctggtgttgaagcaggacaccttctggatgacgcagatagcgatgattctggcgctgacctttggccacagcatgtgctatgcccgcaggcgtcatactttccggagctgttccccacccgcattcgctgtagcggcatcgcgctaatttggcagattggctcactcattggcagcggcgtgctgggattggtggcggtcaaaatcctgcaggcgaccggcggcgattaccatgggctagctatttatatgattgtactaggtatcatctcttttatcggcctaatgctcatgccagaaaccgcacccggcgtgcgcggtagcgaataccacaactggggagaaaaacgctaaaccttggcgggcaaagtcttttcagacataggcctttgcccgcagccaaaacaacatccagcgcaaaacctcttggaaagtcatgctattatgaggctatctcaatttcggaattccgccttcgccatgacagaatcttatgagttgaacggtaacgtaccggtaaatcagcaaatttatcgcaccctgcgacaggatatcgttgcctgcgtgataccgcccggcgcgtttctttccgaaaaagaaatctcggcacggttcaacgtttcccgccagccggtccgcgaggcctttatcaagctggccgaggccggactggtccaggtgctgcctcagcgcggcaccttcgtgatgaagatttcagccaaacgcgttgccgatgggcgttttattcgcgaggcgctggagacggcggttattcgccgggcggcaggcgtagtgacagaccacgacctttctctgctggcacacaatcttcaacgccaggaactggcggcaaaaagccatcaggcgcaggagtttttgcagctggatgacgaatttcaccgcctgattgcacagattattgactgccgactggcgtgggaaacgattgagaatatcaaggccaccatggaccgtgtgcgcttcttttcactgagcaaagtctctccaccagaaaatcttatcgcccagcattacactatctatgccgccctcgaggcaagagaccccgacgccgccgagcaggcgctgcgtgcccatttgcaggagatgatcttctctatcacgcccatcgcggaacaaaacagcgaatggttcgacgtcgaataacggcaatcaaccgcaaatagagtgcgatccgctccacgttttatgcagtccgagccaacctgtataacagggtagagtaagctaactaccacgacttactggcaggagacacgtgatgacggtcattgacgctttatctacgccactgcaaaaactctactacaatgcccaaaatacgctgccgttgtctcatctcgacgaagagaagatctgccagattgcccgcgatctcgacagcatgggcagcgacaaagagcactacgtcaccggctggatggcgctcaatccggtggtattgatccgccgctatcaaaacaaacgcggcagcgccgacggtatcgtattcacccgcagcaatcagtaccgcctgagcgtgcagtcggtcatgtttagcatccccaaacccttactgtggatcacctttcgtcgccggccaaggacaatgaaagtgattacttacaatcgtttagacaccacgcagaatgggcttcagcaatatcaaaatattcaggaagacgaggttaaggcgcggcttgaggccgactggcgcgagctgaatgattatctggggctcgcctgttggcagcgggaaaacggccagccgctgtggaacgcgttgcaggacagcatcacggccgacaggctgctcggactgtgcaatagcctgttcttcaccaacggtaagctgcaaaaagagggagagttcgagggactgtggcacaaggggatgtttattgcccgacgcaacgacggtgcggcagcgtttatgctggcctggcaacatcccgagacccacgaggtggccagctatctgtttgaaatattgaaaaagaatactggccccactcgcctcaggctttcacttcgccccacaagcaggagaagttctacccgttaaaccccttcgatgcgcagcatctacacgatgcgctacaaatgtttgaacgggcagaaggtgccttaggctgctttgagcaacagcgtcaccaccagcgatgaaaatggtgaaccgggccgatgccctcacccacttccagagagtccgcctgctgcaacgcctgctgtaaatagtctttggctgcgctgacggtgtcaatccagttagcttttctcggcctgattgcagccagcgcggcgctgagtgtgcagccagtgccgtgcgtattacgggtggcaatgcgcggcgcagtaaagcgttcacgatagtgagcggtcattaaccagtcagggctttcactgtcactcagatggcctcctttcatcaataccgcttcacaccccatctccaaaagcgcttcaccctgtcggcacatctcacgctcgtcggtcgcgacggcgcagttcaacagcgcagccgcctcaggtagatttggcgtaatcagcgacacctgcggcaacagccatttacgcagcgcctccacggcgtccggcgtcagcagcgggtcaccgctttttgccagcatcacggtgtccagcaccacgtaggccggagccttttccagcttacggtaatagcgcagccgctctgcgaccacttccaccacctgtgtgttggccagcatgccgattttggcgctgtcaatgcgcacgtcgctcagcaccgagtcgagctgtgcccccacgaatagcggatcaatgtgatagaccgactgcacgccacgggtgttttgcgccaccagtgcggtgataacgctggtgccataggcctccagcgcggagaaagttttcaggtcagcctgaatacccgcaccgccgctcgggtcagtgcctgcaatggtgagcgcattaatacgtcgggtcatagcgcccctccgttaagcttttcagcatcaagcagatagagattgtccataaatgccggcgtaaagctgcccggccccttagccacctcgcaggcgagctcaccggcgcgagacatcacgcggcaggccgcagccacgtttgccaaacggtcgcccggcaaagaggtaaaagcggcaaccacggccgagagcgcacagccagtgcccactacgcgggtcattagcacattgccacccggcactgacacactgttttcaccgtcggtgacgtagtcaatctcgccggtgaccgcaataatcgcaccggtctggcgagccaaagtttgcgcagcaggcagtgcggccaatgaagtgtcggcgctgtcgacaccacgaccagaagccgccaggccgctgagcgccatgatttcagacgcgtttccgcggattgcagcaggctgaagtctgataatttcctgacaaaactctgagcgccagctgagtgcgccgacggcaaccggatcaagcacccacggcttctgcgcctggttagcggcgtgaatggcggcaagcatggattcggcacgggattcggtgagcgtaccgacgttcaccagcagcgcgctggccatggcgctgaactgcgcggcttcacgcgggtcaaccaccatcgccggagaagccccgagcgccagaagaacgttcgcggtgatcgactgcaccacgtcattggtgatgcaatgcaccagcggagaagcttgacgaagatgttgtaaggcactggcggcgtatgcgccgggaaaaacggtaggtcgagtggtcataaaactcccaaccggcgatcaagaaggggtaccggtgggataccacgacttccctacgctggcattatccagatcaggtaatacgggtatctctcagccttcacaaagaagggcaccccgagtcattgaagctaagggttagcataagggatgtaggtgacttacagcaagctctctattgctctctctcaaggcctgtacccacaatatacacgacataagtcatcgccgaagcctgcggggttttcggttaaataaacagtgggttaagggttggaaatagcgtgcgggtattctggttattacgttttggtccttaacaatggcctgcgcgaatacaggtttttgaacgccgcaaatctttcgaaattgcggcgtttgattatcttgtcaggacattggggcgttaatcgtaggccagtttatgattaatattgtagagcgtggccgtacctgccatgacgtgctgtccttcattgccctgtttatgggattccacgttggtgatgtggtagccgacggcaccggcatccaaagctttcttaacaaaagcgctatttaattcctccagggtggtcgcccaactgacggaggtcacgccgacggcgcgcatggaggctaattcacgatgtgataacccagaacggatcagaaccggtttaacgtcgtgtggagagaatattgataaaacgtctttaactaaatctttcatagccttactcctcagtattcgtcttcaaactggagcttttgaagcggattattcagcgccattgataaatccaggtgattacctttctaaatcatttaacggcttcgtccctaataaatacctttctgcagcggcagttttagctttagttgctaaataattgttaagaaaactttagaaatattttaaatagtttttaatgaggatattaccagctagttacagtttggctttttttgaaatggtgttttagcagagattgcctgagtgaagagctcactcaggcagatagtgcgcttagtcgaggtcgattagaagatagaaattgggtattcgacgtaaacgcgcacttcgttaccgcctacgttatacgaagaggcatcggaagatacgcgcagaaccgagtagcgcagtttgagcttcaggcctttcgccacgccgtctggcaccttgtactgaatctggttaaacagttcgtgctcgtggccgttggtggtttcggaggtctgaatattatcgccgcgcacgtatgccacgtcatagctcaggccctgaacgccaagcccactgaggtcaaccgagtaagccagctgccaggagcgctcgccctgaccgttgaaatctgaccagtaggagtttgacagccagatggtgttgccgccatcgccaaccccgccatttttgcggtagccgccgtagttatagccggtgctgccgttgctctgctggtaagccagtttgaaggtgtggatgccggcgacatagctagttgccaggctccaaatatcgttgctgcgcccggtatcgagcgtgttggcatagtcttgagtcagacgtgatttatagccgttgaagtcgaaaatcaacgcatgctctggcgccaaaggctgacgataggtcatgcccagatactgcttgttcagcacgccttctacgttcgatgcatacagtgagccgctcagacgatcgttaaactggtagcgcgcaccgccaaagctcaggccgtgcaggccgctgttgtggctgtcatcacttttttgctgttcgtcggtgaaatgaccggcggtaatatccagcccgtcgatttcctgcgaatcaatcataaaaccggtgtaggtttcatcaagcaggcgtgaactatcggcggtgaggataggcaactcaggtgcctgggtgccataactcagaacggttttggagatacgcattttggccgttgcgccaaatttggcgaggtcagacttggcgcgtccgtcctggtcctgcgagaagaagtcgatgccgcctgcgccgctatgaccacgaccaccgtcgaggcgaacggcgtattggccaagcgcgtcaaagccgaaacctaccggaccctgtgtaaacccagaagtgaagttggcgataaggccctggccccactcttcacgcgtccgcacgccgtctggtttgtagttacggtcgatataggcattgcgcagcagcacattgagatggctatcggcgataaacccattgttatcctggacggtgtcggcataggcagactgcgcacaaagcgctgccaaaagcgataatggcaaaatttttttcacggtgcgttaacctgttttttcttatctaaagtgattcataaatatacaaatccggaaaaccctatttccggcggggcaagcataccctacttgcgaaaatgccaaaaaaataattcgcgtcctaagcctatttttttaggcgcgatgacagaaaaaaaatgccctgagagatcagggcatcgttaaatacttgtaaatatggggaaaacgtcaggttctcggataacctttaaccgaatgatcgagattggattctaatttagaaatacgcagtgaaagatatatccccaatcctacacagcccaaggccagaagcgtctgaatcagcaatctcggcgtgggttcaggcagggagacataattgatgattgccgaaagcgcagcaacgatgcttgccataaagcaccagcgcataaggctgtccatactccgcaacataggcgcgatgtccgccgggttgtgtttacacaccatagtcgctccttttctctgatgtttatacctgatgctgataactatagacggtaaaagtatcttggttaacattttgaatgtgcggcttttatcacattaatgattaaggtagcattaagacaataattattgttataaaaataatgtcatattgaaaaataaggcattatatcttcattctcttccacattatttaattctacaaccttttgaggttctgaaaaatacccgttttgagatagcgatcacccaatgaagcacagcctttctacaccgactcgcgctggatccgccgcaggagatcttcggcaaaacgtttaacgctgaaagagagcgttttttccgacttaaatagcatccaggcacggtaagtatccattttccattcgggcaaaatacggataaactccccctttctcatcgcctcacgcgccatatagtcgggaatatacacaatacccgttccagctaccgccgagctcagtaatattgtgctgttattggctcgaaaacggcttcgcacctcaatgtccaacttttgcttttccttgcgaaaaggtaacacgatggtatgcgcgaaaccccgcagcaaaatatagtcataacgcggcaagtcttcgggtttctcaatcgccgcatactgactcatatattcaggactggcgtaaagacccgagctaatatcggtcaacggtttgattaaaggacgatcgggtgcatcgcgactaatcacggcggcaggatcggctaaatatgctgcggcagataaaaatatagccatcgcttgatggctatattatccgcaacgttcaattaagaggggggtttatcccttcgagaagttcgcctgaatacgctgttgcaaataatcctcggcgctgatgggcggatatttcgcgcccggccccagaatctcgacgtccttatttgcctggcagaagaacgccagactgtagcgcggcccctgatattcgcccggcagcgggcttctgacgcggtggaagttcgacggcagctggtcgtcactccagcgcatcagcatgtcaccgatattgcaggtgatcacctcttcacgcggctcaatgctggtccactgctggctttcgtggtctttacccgggcaaacctgcaatccaccctgccccggacgctggaacaacagcgtcaggcagtcaaaatcggtatgagccccggcgcgccacatgccctgctgcgactgctccgtcgcatagtagtgcagcatgcgcagcgtgctctgataggtttcacgattcggattatgcgcctcctcaaagaagtgttcggcaaaccccagcttgagcgcgaagcaggagagcagcttcatgcccagttgccagcactgcgactcgaaggccagcatggtatttttaaacgcaggcagctcctgttcacttggccacagcgggtccatcaatgggcgcgtgatctgataagactctttctgatccggcgttttggttgacggacgcacctgcgacttgttctcccatccagcgtttctcgctagcggatactgcgccttcacctcgttcggtaacgagaagaagctctctgtcatgttaaatgcacgacggatatcggccaaatcgatgccgtggtggcttacctggaagaagccaatctctaccgccgcctgccacagctggtctgctatctcacttttgcgtttttcaaaatcagaaaggtcgatgcagcgcacctcgcgggtaaaggtctcttcccccatggccccatctgagcctctttctccagttctttcagtgcgtaagcttggttttgagtagtctgagtcatgatgtttttcctgatctttatcatagggtttatgcgagcgcacgctgctgtaaggtttttaccgccgccatcgcgtcgacgcgcagggcgtcaaggtcgaggcccggcacgctgtcgttttcgacaatcatgcgaccgttgatcagcagggctttcagcgaggcgcgtccccgcaggccaccgggccaatggccatgtcgtgcagcccgaagtagcgcggatcgtcgagacgataaacggcgatatcggcgagcatgcccggctgtagcgtgccgctgcgcgatagcccgaggatttgcgcaccgcccgcactccccaacgcaccacgtcttcgatggtggcggcatcggctccgccttcaaaggtgccgccctcgtagcgcggctgtgccagcatgcctttacgtgcgcgctgcaacagccacgcggcgtgcgcctcactttgcatatccgccgcctcgttggaggccgcgccgtcaacgccgagcgaaactggcaccccagccttttcaagcgccagcagatcggcaatgccgctgccgagtcgcccgttactttgcggacagtgcgcgatccccgtgcgcgtcgcccctaacaaggtgatttcctccggcagcagcttgaccagatgcgcgaaccagacgtcactgcctagccagtcatgctcggcgcaaaactgaaccggcgtcatgccgaatttggctcgggctgcgtcgagatagtccacggtttctgagagatgactgtgcaaacgaatacccaaacggcgtgcaagcttcgccatctcacgcagctgtgcacccggcgcagagtgcagcaaggtggtcggcgccatcaccacgcgacgcagcgattcggggcgcgagtcgtgataacgcccgaccagtcgttcaacgtcagtcatgtaggcgtcgaaaccttccggccgcagcgccagcggcaggtcctgctcaatggcgcgcgactgggttgctccaccgcgacacagcacgatgcgcattcccagcgcttctccctcgctaaaaatgatatctgaggtatcgaaaggcatatccggccaataaagatagttatggtcggccacggtggcgcagccggaacgcagcagctcaatcagcccaacgcgcaccgccagccgaaaagtgctttcgtcgaacgccgcgcgaaaacggtaaggcgttgcgctcagccacgcggtcagactctggttcagcccctgcggctcgcctttcagcagtgactgaaacagatgatggtgggtattaacccatgccgggtacaccacgcagtcgcgggcatcgatgatgcgctcgtcggccagcgggctcagtgcgcccattgcctcgataacgccgtcgcgaatccgcatgtctggccccgcatggcgcgacgccgcacccggcagaccggtgaggatcgcgtgagcatttctaatcagcagtgtcatggcagcgctccttaaggttcaacgtgcaggccctgcacgatgtctgtggtgtaggcctgcttccagtcagtgtcggccttgagcagaccggcgttgaccataaagtttcgagttttctgccagcgcgcatcggtcatggtgccccagccctgcgttgccgcgtcgccgccgtcaatcaggtgatgctgtttaatctgcgatacgccccaggccagcaaatcgtcggtcatcttcggattatctttcttgatcaaggcattgcccggtgccggattctgcaaatagctcacccagccttccatcgaggcgcgaacgaactttgccagtgcctctttgcggctggcaatcaggtcaggacgagcgatcaggatcccgccatacggcggataaccgtgctcggaaaacaggaagaagttcgactttacgcccgccttctgcgcctgaaacacctcggaactgacgtaggcctgctgcgcgacgttgtcgtcggccacgaaaggctgaatgttgaaggtgtaggggcgcgcctgcgcgtcggtgaggtgatactgcgctttcagccatggccaccaggtggattgccccgaactggagaccagaatggttttgcctttcaggccatcgagcgaggtgacggaaacgtgggtcagcagaccctgcgggtcaaactggaagggtgcggcgatagccttggccggaaagccacgctgcacggcatcgagcagctgtaggtcatagccgataattacgtcggcgcgcttggccaacagcaactgcatgccgttgacctgcggaccgccagactgaatgctgacgtccagcccgtagcgtttgtaaatgccggtcgccagcgcctgataatatccgccctgctcggcctgagcgtaccaggacgtcagcagggcaatcttttcatcggcctgagcggcctgcgaaaaggcgccaagtagcagcgtgcccagaacacagcatgacagcggcaatcgagatgtcattttcattgctcctctcattgttgccgaagaggggcaaagcagacgcggctcagcctcccatcggcgcaaagtgtgaaatgcgaaatggttgctgagcaatgtcccgcgcggagttcccgcactgaccgcttctactcactttcagttatacaaaaacggtgccaagttgaccaatgccctatccatgccctttgtgcggaaattgcccccaaaaaacccggcccactctgcaacctttgattcaatgcagagcagcaggcaccaaaatagtgcacctggacgacagctaagcgcggttctcaatttggctgaacagcatctccagttgtttgagcatcatcgaggccgctaacgacaactggcgcgaaggcgcaacgcacagcgacagggtgaaggatttcagttggggatcggtcaacggaataaacgccagttcatcgctgatgacctcgtccatgatatccagccagcacagaataccgatgccaatctgctctttgattaatgacctgatcatatgaatattattggaaacagcgacttcgttaaccctgccaccgttgatattgaccagcgcctcgaccggctccgacagcattaacggcgccgagggtatgataaacggatactcgatgcactggctgaaacgcactccgctccgccctgccagcggatgctctttgggcaccacgatgccgagattaatctcggcgaacgcccgcacctgtagctccttcgagctctgaggattgagcatgatgccaaagtcggcgtcgcccgacatcaacgcctgctggatatcgatattgttcatggtggtcaacgtgaaagagatattcggatattcgtgatggacctttttgagcatcgacgagaagaagtggcggttgatggcgtcgatggtcgcgatacgcacatgcccgcgtcgcagtccacgcaggtcgtcgagctgttcgcagacgcgggagaaatctttcttccagttattggccgcatgcagcaacagctccccggcggcagtcagtctcagcccggtcgggtgtctttcaaacagcggcatcgccagctctttctcaacccgcagtatctgcctgtcgatggatgaggcggcaacgtgcagggtttccgaggccttgcgaaacgatccctgacgggcaacttccgtgaaatacagtagaaaacgggagaatgcgaacatatttcgagtgctctcttttatgcaacgggatgtgcgaatcaaagcgctggacgcaacggttttataacaataacgtagttttcaaggcaacaggaacattcgtttcaaagcacataaagtgatcgatttggcgggtatcccgccgacggtgcggttaaacgcgtttatgggttgagtccacattcatcacaaaaaaactcaacgtgattaattaacggtaaaacggcaaatcataatgaaagatgcagagttaattccagtcacagttaaaaaaatgaataataatggtgcagggaatatttcattacagcttattgcccaagctggaagcgttttaccgcgttattctccgggcgcgcacatcgacgtttttattcctgaaaaaggtccacggcagtattctctttgcggtgaaaatggcggcgaagaatattacgagatttgtattaaactggcaccattatcaaccggcggatcgcactatcttcaccaccagctcaacgtcggtgacggcctgaaaatctctgcaccacgcaatcatttccctctgccgcaggcgcggcgtttcctgctgtttgcgggcggcattggcattacgccgctgctggcaatggcggaggaaattgctaaacaaaatattgattttgaactgcattactatgtctcacgcgagcaggaaacggcgtttatgtcgcgttgcagtgcgccaatgctggccaatcacgtctttcttcactacagcgacgcaaacgattccctgcgcgcgcgtacgcctgcctgtttacgctcaccggatgccgaaacggcggtagtggcctgtggtccagacggctttattaaacgcctacaggatattatgcagtttaatcgctggcagcctgcgcaattatcgtttgagcgttttagcaatgccgaattaaataacaacgccgataatcagggcttccatattcagttaaattcgaccggacaaagatttttagtgacgccgagtcaaaccattgccgaagtattattaagcgcaaaggttgatattatgctgtcctgtgaacagggcgtgtgcggatcctgcattacagacgtcatcgagggtattcccgatcaccgcgactgcgtattaaccgaggaagagcgcgccgagaatacgcaaattacgctgtgctgctctcgttcgaaaagccccgttctggtgctggacctgtgatgtctacgccgagccagtcaatggcgaacctgagcctcaacgcgccgttaaacggcctcgcccatgctcgcctgcccgcatggacgcttcctgccgactggccgcagcaaaacggtgagcccgtgttggccgatatccatttcagtcagggtctgattaccttactgacgccgagccaggcgtcgaataaacacttatggaatcttggcggcgcactggtattgccgggattgatagagccccacgcccatctggataaaacctttaccctcacccgcagtcgtccgcaagggccgggtttgctggccgccattgaggcgatgcatcaagaccgccagcactggacgccgcaggatcttcgccagcgcgccttgcgcggtctgacgtgggcggcagcgcacggcgtcacgcatttacgcacccacatcgactggttcgacccgacgccgccggttgcctggcacgagatggctgcactcgcaccaaccggcttgacgcttgaacgggtagcgctggcgcctttgacgctgttcaccgacgttaactcggccgatgccatcgcacgcgcagtggcgcagagcggcgatagttgcctgctcggcggctttatacactcgtcgaactggaacccgtccgccatggcgaacctgatggaaagcgccgcccgctggcgtcttaacctcgatttgcacatcgacgaagagctgtcagaacgcgccaacgggctagtgtggctggccgactatctctcaaggcacgactttcccggacacatctgctgtagccacggctgcgctctggcctcaggcagcgaacaacaggcgcaacaggtgctggccgaactggcaaagcatcgcgtgacgctgattgcactgccgatgaccaacctgctgctgcaggacgcggttgtcggccgtaccccgcgccagcgcggcatcacccgacttaaagaggcgcagacagcgggcatccccactctactcggctgcgacaacgtgcaggacgcgttttgtcccgcaggcagctatgacccgctcgatacccttagctgtgccctgtttagcgcccagctcaaccaggtatttgaccagcagtcgcggcttatctgcgacctcggcgcgctgaccggcgcaaaagcacagagctcaccgctgaacgcaggcagtgcggccaatttggtgattttcccgggaagcgacagcgtaacctggcctctaaacagcgcggcgcgccgggttatcagccacggcaagctcacctatcaacggatgtggaattaggagtttacccatgagtcttgaagccggtgcgggcaaaccgctcgcgcaatacgccgcctggcgacgtgcaggcgattacattttcctgtcggggattattccggtgaatccgcagacggccactatcgtgcgcggctttgcggatattcccgccgaggcacgcaggctgctcggtgagaccggcgagttctcgaccgacgccaaacagggaccgatcctggcgcagagctggtacgtactggaaagcatacgccacaccctcgaagaggccggtgggcaaatgagtgacgtcatcaagctggtgcagtacttccgtaacctcgaccacttcccctactacagccgggtgagaaagctgttttatcccggacaaccgccggtctcgacggtggtacaggtcagcgaaatgttgcccagcgccgaggtgttaattgaagtggaggccaccgcatggctgccacagtcctccttaataaaataaacgacgaggcacagtatgattaacggctacattcccgcagcgcgctttctcccgtttctaagctggacggccatcgctgccctgcctgacaaggccaacaccgtgattgtgttgccgaccggtgccatcgagcagcacggcccgcacctgccgtgttcggttgacagcgtcatctcctctggcgtggccggtcacgcgctggctcgcctgccggccgatattccggcctacgctattgcgcctatcacctacggcaagtccgacgagcatcttaacttccccggcacgctcacgctgaccggcgacacgctgctgcaaaccattctcgaggttgccgagtccctgtatcgcgccggttttcgcaagctgctgatgatcaacgggcacggtggacaaccgcaggtgctgcaaatggcctcgcgcgagatgcgcctgcgtcacggcgacatgattatgatcccgcacgacgtgttccgcgtgcctaacgttgagacccgctatttgagtgcccaggagcaaaaaatggcgatgcatgccggtcacagcgaaaccgccgtgatgctggcgctggccccgaatgcgtacacatggaacatgccgtagccaattatccgccggaattcccctgtccgacgctgtcgaacggccgccctgcagccgcctgggcctcctacgactttgggccgagtggcgtgattggcgacccgaccccggcgaccgccgaacagggccatgcgatcctcgactccctcgccgcaagctgggcgcaggccattaccgaaatccaccagatggagtggaaaacacgcagcgaaccgacgtggggcaaacaccactggaatggcttcgtgcagagcagttttacgcctccttcgtcctccttggcctctgaataaaggaatgtccgcaatgaaaccttcaccgagctataccctgcttgccctgctgttggcctcagcgtcgctttccgcgcaggcagaagagaaaatcaccttcctgacaaactggtatgcgcaggccgaacacggcggtttttacgaggcgcaggccaaggggatttacaagaacgccggtctcgatgtcacccttaaaatgggcggcccgcaggttaacgtgatgcaactgatggccgccggtcaggccgactgtactctgggcgacaacggtcaggcgctggaaacttggcaggcaggcgtgcacgcggtgacggttgcaaccgtgttccaacattcgccaacggtgtttatcagccacgacaaggtgaataagcccgaagagctgaaagacaagaccttcctgctggcgactgaggcctacacctctttctggccgtgggccaaaagcgagctgggtctcgccaacgccaaaatccgtccttataccttcagcgtgcagccgttcctggccgacaacaacctggtgcagcagggctacgtgacctcggagcctttctcggttgaaaagggcggcaagccgttctatgtctacccgcttagcgactggggttatccaccttacggcaactcgattatctgcatggccgacaccgtcaagaaacgcccggccgcgctggctgccttcatcaaggcgtcgatgcagggttggaaagcctacttgcaggaccctacggcgggtaacgaactgatccgtaaggataacccacgcatgggcgtcgaccagattgccttcgggattgcacaaatgaagaaataccaactggttaccggcggtgatgctcagaccggcggcatcggcatcatcaccgtgccacgcctgaaagagacctgggacatgctggtcaaaaacaagctgatcgacccgagcaaggtgccgtttgaccagacctacagcctcgacttgatcaaagacgcaaaggtcatgccatgaataccgcccccaatctgacggtgataggcgaagaacgcccccaccacgcgctcggcacaccggccattgaggtgctgtcggcggagaaaatatacagcaacggcacgcgcgcgctgctgccggtgaatctgaccattaatcagggtgagtttgtgacgctgctcgggccgtccggctgtggaaaaagtacgctgctgaaaatggttgccggactggttgaaccgagcgatggcaagctgatgctgtggcgcaaagatagccgcgagaaggcgcaggtgccgctctcctttgtgtttcaggaggcgacactgatgccgtggagcaacgtgcataacaacgtgcgtctgccgctggacctcgccggtgtgccgcgcgccgaagccaatacccgggtcagcgaggcgctggagttggtcggactgggtaagttcgccaaggtgttgccgcgcgagctttcgggcggcatgcagatgcgcgtgtcgatcgcccgagggctggtgacgcgcccgaaactgctgctgatggacgaaccctttggcgcactggatgaaatcacccgcaacaggctcgacagcgacctgctgcgcctgtggcgcgaacagggcctcaccgtggtctttgtgactcattcaatccacgaagcggtgttcctctcgcagcgggtgatcatgatggcagcgaggccgggccgcgtggtggaagacatcgccatcaacgaacctttcccacgcgacgaggattttcgcgtcagtcccaccttcgcacgctacgccagacagctacaggacagtctgctgcaggccagccaatcgggtatggagtcataagatgaatactgccaaaacgtcaccgtggatgagtaatcctacttttcgcaaaattttatatccgacgctggttgccgtcgccgtgatcctgctgtggcagggctgggtcagctatttcaagatcccacagtttctggtgccctcgccgatggtgatgctcgagagcctgtggatcaatctcggttcgctgatgatgtcgctgctctataccctgaaaatcacggtgatctcattcctgctgtcgatagttatcggtgcactggtggccttcgtgctggtgcagaaccgctttgtagaaactgcgctgtttccctacatcgtgttcttacaggtcacgccgattgtcgctatcgcgccgctgatcattatctgggtcaaggacacgacgctgtcgctggtggtgtgctcgacgctgatggcggtgttcccgatcatctccaacaccacgcaggggctacgcagcgtgtcgccgggactgctgagctatttccaactgagtcacgctagccgtctgcaaattctgctgcgcctgcgcataccttcggcgctgccttacttctttggtgcgctgcgcatttccagtggtttatcgctgattggtgccgtggtggcggaatttgtggccggtaccggtggcaataacaccgggctggcgtatcagattttacaggccggatatcagctggatatcccgcttatgttcgccgcactgctgttgatttccctgaccggtatcgcgctgtttggggtgatgtcatggatctcccgccgtgcactccgcgcctggcatgaaagtgaagcggtgcagtcacattgaccgtcgcgcaaaggttttaatcgattgagggaagaagatggaaagtgaacaacgcaaacaggcggtagcgcagatacagcaggcgctgcccgacctcgagtggacgttgcaggccccgaaggtgaaacgcatgtcgcgcgactttcactggtttagcccggtgctgaaacgccagcttgaagacaagcaggccgatgcggtggtacgccctcgcgacgaagaagagctgcgcctgctggtggcagcctgcgtgcggcatcaactgccgctgattatgcgcgggggagcgaccggcaactacggtcagctggtgccgctcgtgggcgggattctggtcgacatgacggcgtttaatcaggtctgtgagctcggtaatggcgcagtacgtgcacaggccgggatcaagctggcagagattgaaacccacacccgtccccatggatgggagctgcgctgtatgccgtccacctatcgtcttgccagcctcggcggcctgtacggtgggggctttggcggtataggttccatcaactacggtccgctgggtgcgacgggcaatgtactcagcgtaaaagtgatgaccgttgaagccgagccgcgggtgctcagcgtacccgcacctcaggccctacttttgcatcacgcttatggaagcaatggcattgtgctcgaggtagagctggctctggcaccggttcatcgttggattgaacgtctcgacgcctttgatgacttcaccgacgcgctcgattacgccgacgcgttggcccgctcgccgggcctggttaaacgccagattgcgctatttgctgccccgatccccagctatttcagccacctgaacggcagctatcgcgcgacacagcacgcggtcatcagcgtcgtcgcccaggagagcgaagggttgagtcatggcttagtcgcgcgctttaacggccataacgcggtccgtcagacggcggaggaggcgcgcgagacaaatacctcactgctggaatattgctggaaccacaccacgctccatgcgctgaaagtcgacagctcattaacctatttacaaacagcttttaattattctaattatcgccaacaaataattaacatgaataccttatttggcgatgaagttatttcgcacattgagtttctgcgcgataacgagggaaatatcaccgccagcggtttgcagttagtacgttattccaccgaggagagactgaatgaaataatgcaaatcttccgcgagcgtgacgtaaaaataaacaacccgcacgtttttcaaattgaagacggtaaacagggaaatatccgtccggaggtggtttccgttaaaaaatctctggatcccaatgggttacttaatcccggaaagctgcgcggctgggaaatacgcgaccagttaattattgatgataaccctctcttattgactgaccgataaaaataactattatgccccgcccctttatcggtgcggtggcaaccgtttgcgtgcaatccgggaaacaacaaatattggcagctttttgctgctcgcaaatgatactaattttgacaggatgagatacatgacaatgaacaaattcagcttctctttgaagctgggcgcgcttttggtttcacaggcactctttatgggacacgcactggccgccacaacacccgcaatgtcagactgcgacgccggcgtcgccgactcactgacccaaatgttcacctgtggttcggtacacggtagcctgcgtatgctcgactactcaacgcataacgcctatttctcgaaaggttactcacaggataccttcagctacggcggcagcgttaaatataccactgcggaatactacggcctgagcctcggtgtaagcggcatcttccagcgtggtatcgaccacaatcaagaccatctggtaagcgaactgggtccaaacgagaccaacttcggcgaagcctacctgagctggcactatcaagatttccgcattaccgccggtgaccaacgcctcaacattccgttcctcggtgattacgactggcgtattaccccgattctgtaccgcggtatcgacgcaaactatggcgacgccgacaacttcctgcatgccaccaaagtgacccgcttcaagccgtggggtgacgatcagttcctgaacaccaccgaatacaccgatgcagacggcaccaccaacggcatgtgggctatcggcggcggtcgtgcgctcaagctcgacgacaagaagctgactggccaactgtggtatgaagactacaacaactacaccaagatggtgtacgccgacagctacctgtcttggtcggatctcccttcccaacccaagattggcctacagtttattcgcggcgtgagcgacggcaaggcgttagcaggtgaagtgaacagcaccagctacggcgcacagttcgcgatgaactttaccccgtctctgcgttggtctctgaactacgaccacatcgccgccagcgataacgcctacggcgacggtgcgctggtaacgccttatgcgcacaacagctcttctggcccgtacttcgcacagccgttcttcaccagtactcaggacctgggcagcggcaacgcctactctaccgacttgaactggacggcgaccgagagcatttctgtcggtacccgttactcgttcatggacctgaccgccagctcaggcgcgtcaagcagcaaccagtccgaatatctggtctacggcacttacagttttggcggcgtactcaagggcctcagcgtgaccgatttcgtgggcgtgcagacgacctcgacctcggatgcaaacttctggcagaaccgtctggcgttggaatacgatttttaattagaatgaatttcccggggaggcttccccgggaatattattcttagaggagtcgctattgcccattcaaatccgcccgtatcaggaagccgaccgccccttcttacgcaccctgtatttggcatcgcgcaaagaggcttttttctggttggacagcagcgactggaagcttgaggatttcgaccgcaaagtcattggcgaaaaggtgattgtggccgagcaagacggcaaaatactgggtttcgcgtcgattcatctgcacgaaaactttctgcataacctgtttatctctcctgacgcacaaggtcagggcgtcggcagccaccttctcggcatcgtcgagcaaaacttcactcgcaccggctcactgaaatgcctggtcaaaaatgagaaagccgtcaccttctatttaagccgtggttgggaaattatctccaccggcgacagcgagacgggtgaatattacctgtttcattttcggatcaaacggtagtctgatttaaaacaattcaacgacaagtaatcactgctatacctaattagtcacattcagttactaacaggttaacaatgaaaacatacaacaaggttatgctggcttccgtgctgggcggactgctggtgctcaatggatgcagttctcaggtgacgaaacccgagaaatattccggatttttaggtgattactcgcagttaaagccggtgactacgccctctggcaaaacggtgatgcgctggatagatccgtcgtttaacaaatctcactacacctccctgttctaccaacctctgacttacttcccaacgcctaaacccaccgatcagataagccaggccacgctcaacggcgtgctcgactatgccaatacccggctgaaaacggcgatgcaaagacggctgcctctaaccaacacgccggtccccggctcgctcatcttcaaaggggcgattactggcgtgagcacctcgacgcagggaatacagttctatgaggtcatcccggtggcgctggttatcgcgggtacacaaaccgcgaccgggcatcgtaccaaaaataccgagctgtttttcgaaggcgagcttatcgatgctgccaccggtaaagccgtcgttaaagtggtacgcatgggagaaggcaaatcggtgccgaactcctctcaacaggtcacggttaacgacctgaaaagcgtcattgacaatatggcggttgacgtgacgcagtttaacgaagctgcgcagtaatcgtctctgaactcccggcggacaacgcgggccaccgggaggcagaaaaatattgatcgagcactgacgctcccccgtgcagtcaggcgcagatctcaaaataacgggtctaatcccttggtctgataggcgttggcggcgctgctggactgtaaatgcttgaggaattctcggctcaatgccgggtttttcgcctctttaaacaccgcggcggagaacgacgtgggtttctgcaccgcgtccggcaggcggcccactatttcgatgccttgtaccgccagcaactcgcttatctgctgaatcgccaggctcgcctcaccggtcagcagtttttccgccgtaaacccgccggggagagtggtggctttggcgttgatctcggcggcaatgcccagtttctcaatcagtgatttgaagtagataccgctggcaccgccgagtgaataggccaccgaacgggcctccagcagcgtggcgatgaacgccgctttgctggagatatcaggatgcgcttcacccgctttcaccgcgatgccaatgttggactcgaccagctcaacgcggctgtcggcgtcgacgataccgtccgcaaccagttcatccattgcgctgaccgtaaccagtgcgacgtcggaacgaaacccgctgcggatgctctccataatcaccgacgttgtatcccacttaacctgcactgcgtgaccctgctgctcccacgcgggtaaaatttctgcatcgaagggcgagcgcaccacgaatgcgcaaataacctctactggcgttgtttgagtcattgtcatttatctcattatttatcaggtcgtcgcgttgggcttcctgaaggggagtgatagggattgtgaatttcatccgcgcctaaaatgcgagggttcacgtccgctgctttcaaaatacctgaacggctagctttctaaacatctggcagcaaaaaaatctcttaaccaacgatgggctacgtcacgatggcagcgctcgtgccacagcatcgccatttcaaaacctggtatctcgatgggcggctcgaagatctgtagcgtgctgttctccttgaccagtcgcgcaggcagcatcgcaaccaaatcggtgctcgccagcgcggagagcgcaaacagaaaatgttgaaccgacagcaccacctttctcttcagcccggtttcttcgagcattttatcggtgatgccataaaaacctccgccctctggcgagaccatcacgtgctcgagcgcggtaaattcggcaagcgtaggccgcttggccaggcggggatgccccttgcggctgaccaagacataactttcgtcaaacaactttctacgccgcagacctgccggaacgccgtcgccggtgtgaaacagcacatcgatatcgccctgctccatttttttggccaccccgcaggctgggtctcaaatattgctagccgtgcgtgcggtgcaaccgcgcggaatgcgctcagcgtgggaagcaaaatggccgactcaccgtagtctgacgccgatacgttccacgttttgctgctgattgcaggattaaattcgctatcgggcgataccgcgcgctcgagcagttcgatggcctcacgcagcggctggcggagttcgtcggccttggcggtcggcagcatccctcttgggccgggaagcaaaagcggatcgttaaaaatatcacgcagtttagccagctgaacgcttaccgacggctgcgagagattcagacgctgcgccgctcgcgtgacattatgctcggtcagtagcgcgtcgagcgtcagcagcaggttgagatccattctcctgaaattgttcatggctatacctgttatattttaaattcatttctactatacctcacggccacctactctgcgtttatcacttaacggagagtttgcgatgaatatcctgattgtttatgcccaccctgaaccccagtcgctgaacggtgcgctaaaagattttgccgtaaaacggctcgaagacgcaggccatcgcgttgaggtttcagacctctacgcgatgaactggaagccgcaaatagactcggcggacaacctcgcctacgtcaatgatggcccgttcaaccccgctgtcgactcccgccgagcctatgaacaaggcacgcagagccaggacatcgccgccgagcaggagaagttggcctgggccgatgcggtgattttccagttcccgctgtggtggttctcaatgccggcgattatgaaaggctgggttgagcgcgtgtatgcctatggcttcgcctatggcgtcggagagcattcggacagccattggggcgaccgctacggcgagggaatatggcgggaaaacgcgccatgctggtcgtgactaccggcggctgggaatcgcactacagcgcacgcggtattaatggtcccgtcgacgatctccttttcccaatccaacacggcgtgctgtattaccctggtttcgacgtgctgccaccgctggtgttttatcgcaccggcaagaccgatgaagcgcgtttccggcagctttgtgacacctatgggcagcgactggatacgctgtttagcaccccacctattccctatcgccagcagaacggcgggactatgaaattccggcgctgacgctgaaagaggcgttcgccgaaggtcagagaggatttggggtacatttgaaggaataaaaaaaagcccccgaatctcttcgggggctttcattttcatcaggctaattcattaataaataatgaatttattcccattcgatagtcgcaggtggtttaccagagatatcgtaaacaacgcgggaaataccgtcgatttcgttgatgatgcggtttgagcagcggccaaggaagtcgtatggcagatgcgcccagtgcgcggtcataaagtcgatggtctctactgcacgcagtgaaacaacccagtcgtatttacggccatcgcccatcacaccgacggaacgcaccggcaggaacacggtgaatgcctggctgactttatggtacaggtcggctttgtgcagttcttcgatgaagatagcatcggcgcgacgcagcaggtcacagtactctttcttcacttcgcccagtacgcgaacacccagtcccggacccgggaacggatgacgataaagcatgtcgtaaggcaggcccagttccagaccaattttacgcacttcgtctttgaacagctctttcagcggctcaaccagacccagcttcatctctttcggcaaaccgccaacgttgtggtgagacttgatcacgtgcgctttgccggtagcagaggccgcagactcgataacatcaggatagatagtgccctgcgccagccatttcactgcgtcttgtttacaggcttcttcatcgaagacttcaacaaacacgcggccaatgattttacgcttggcttcaggatcgttctcgcccgccagagcagacaggaaacgctcttcggcagcaacgtggacgatgttcagaccgaaacggtcaccgaacatttccagaacctggtcggcttcattcagacgcagcaggccgttgtcaacgaagacgcaggtcaggcggtcaccgattgcacggtgcagcagcatcgcggtaacggaagagtcaacgccaccggacaggccgaggatcacgtggtcgttgccaatctgcactttcaaacgctcaatcgcgtcttcgatgattttagccggggtccacagcgcttcacactgacagatatcgatgatgaagcgttccaacatgcgcaggccctgacgggtgtgcgtcacttccgggtggaactgcacgccgtagaagcgcttttcttcgttggccataatggcaaacgggcaggtgtcggtgctggcaacggtaacgaagtctgaagggatcgcggtgactttatcgccatggctcatccacacatcaagcagcggcttgttgtcggcgctcagggcgtcttcaatgccacgaaccagggcgctgttggtctgcacttcaacctgtgcatagccaaactcacgctcggttgagccttcaacgcgtccacccaactgcattgccatggtctgcatgccgtagcacacgccaagaacgggaacaccggcttcgaatacgtaatccggcgcgcgcgggctgccttcttcggtggtgctttccgggccgccagacaggatgatgccgttcgggttgaattcacggatttgagcttcggtcacatcccaggcccagagttcgcagtacacgccgagttcacgaacgcgacgcgctaccagttgggtgtactgggagccgaaatcgaggataagaatgcgatgcttatgaatattttcactcatgcgggtgattttccagagcggttaaagttttaaaaaagaactaagaaacgggtaacccggccgaaaccgggtttaacacagactcaatcaactcgatcaaggggccagcgagccaaggcaaaagggacttaggcgaaaaaagcgcagtttacatgcgtaaatgagcatttttgagcctgagttcaacgcagtattgccgaagcgcagcagccccaataaccaaattaagaacccatgcgatagtttggtgactctttggtaatggttacgtcgtgtacgtgactttcctgaatacccgcgccgctaatacgaacgaactcagccttggtgcgcaggtcctggatagtagcacaaccggtcagacccatacaggagcgcaggccacccatttgctggtgaactatctctttcaggcggcctttgtaggcaacgcgaccttcgataccttctggtaccagtttgtcagcggcgttatcgctctggaagtaacggtctgaagagcctttggacatcgcacccagtgagcccataccacggtaagacttgaatgaacgcccctggtacagttcgatctcacctggagattcttcggtacctgccagcatgccaccaaccatcacgcagcttgcgcccgccgcgatagctttagcgatatcaccggagaaacgaataccgccgtcggcaataaccggaataccggtgccttccagcgcttcaaccgcgtcagagacggcagttatctgtggaacgcctacgccggtaaccatacgagtggtacagattgagccagggccgatacccactttaaccgcgctcacgccagcctgagccagtgccagagcaccttcgccagtcgctacgttaccgccaatgatttgcagatcaggatattttgcacgcgtcgcgcgaatacgtccgagaacgccttcggagtggccgtgtgaggagtcgatcagcagtacgtcaacacctgcagcaaccagtgcgtcgatacgctcttcgttaccagcacctgcgccaaccgcagcgcctacgcgcaggctgccgttttcgtctttacaggcgttaggtttacgctctgctttctggaagtctttaacggtgatcatacccagaaggtggaactggctgtcgacaaccagcgctttctcaacgcgtttttcgtgcattttctgcagaacaacttcgcgagattcaccttctttaacggtcacaagacgctctttcggggtcatgaccgcggtcactggctggtccaggtcggtcacgaagcgcacgtcacgaccggtaatgataccgaccagctcgttgccttcggtcaccacaggataacctgcgaaaccgttgatttcggtgagttctttaacctgacgcagcgtagttgctggcgtgacggtcttaggatcggcaacaacgccgctttcatgcttcttaacgcggcgaacttcttcagcctgacgctcaatagacatgttcttatggatgaaacccatcccgccttcctgagccagggcaatcgccaggttcgcttcggtaacggtgtccatggctgcagacagcataggaatgttcagacggattttagaagtcagctgagtactgagatcggctgtgttaggcagaactgtggaatgggctggaacaaggagaacgtcgtcaaacgttagtgcttctttctttaaacgtagcatgggcaatatctcaccaaggtggtatgcggaaaagataaaatattgcagcgagagtatacaggcactcaatcgtttgctctagtactatttcacattttttataaaaaactcttgattacctcgaacgtgcctgtagtatcgattgattaagtctctgttttcgaatttgatctgggtcacatgccactaccttcttcgccaccgatttttaccgtgagccgcctcaatcagacggtccgtgagttgctggaaaacgaaatgggtcaggtctggctctccggcgaaatctcaaacttctctcagccctcttccggccactggtatttcacgctaaaagatgcgcgcgcgcaggttaaatgcgcgatgttccgcaacagtaatcgccgcaccccttttcgcccgcaaaatggtcaacaggttctggttcgcgcgtcgattacgctgtatgaaccgcgcggtgatttccagctgattgccgaaagcatgcagcctgccggtgacggactgttgcagcagcagtttgagcagttgaagcagacgctctccgccgaagggcttttcgacaccgaacacaaacagccgctgccctccccggctcaatgcgtcggggtcattacctctgccagcggcgcggcgctgcacgatatcctacaggtgctgaaacgccgagacccgtctctgccggtggtgatttatcctacggcggttcagggcgtcgacgcgccgctgcaaatcgtcagggctatcactctcgcgaatcaacgaaacgagtgtgacgtgctgatagtcgggcgtggcgggggtcgcttgaagatttgtggagttttaacgacgaacgcgtcgcacgggcgattttcgctagccgtctgccgattgtcagcgccgtcggccatgagaccgacgtgactatcgccgatttcgtcgccgacctgcgcgccccgactccctcggccgccgccgaactgatcagccgaaaccagcttgagctgcttcgtcagattcagtcacagcagcagcgtctggaaatggcgatggattactatctggcgcagatggcacagcgctttacgcgactcaaccatcgcctccagcagcagcatcctcatctgcgtctggcacgccagcaaaccgcactgttcaaactgcgcagccgcctggacgaggcgatgcaaaatcactttcgtcgtctgctgcgccgtgctcagagcctgcaacagcgtttgagccagcatcagccgcagcgccgcattcaccaaatgcagcagcgggtgcagaagttacagtatcgtcttcagcaggcgatgacggcgcagctcggcgacagtcgccagcgctttggtaccgcctgtacccagcttgaagcggttagcccgctggcaaccttggcgcgcggttacagcgtgaccaccacgccgcaggggaattactgaagcataccgcgcagacggcaccgggcgcgatgctcaagactcgactggaagacggctggatcgagagcgaagtgaaatcagtcaccgtcgagaaaaaaccgcgcaagcgcgcggccgccagtaaaaaaaccgactaacgcagaacaggcctcaccacagcaaatagctggaggtcttctcgccctcaatccatacttcgcgcgtttctccgacgggcagaacaacgttcagcccgcgccagcgtggacgatattctccacggcgcgtaaagcgcagattgattcgctgatcggtatattcgatgtcccacgccagccacagcgccatcccctgctgccagtcgtggctttcgccgtcgtcctcaaacaggctaccgctggccttgcccgcgcccggcagcgggaacacttgcaggctgcgttgagtgtccagctccacgtcgcagtgcgccagtcgtgccgaacacggcagcgcgctgccgccgcgcaccattaagggcaaccggtccagggctgccgccagcaggattcgctgaccaccacggaaccactctccgctgtaaaaattgacccaaccggttgcgttatcgggcagatagacttcgcgctcgcgctggcctttctcgaccacgctggccaccagcagatcacgccctatcagaaaatcatcgttttcttcgaaggtgctcgcgtcatgttcgttgtccagaaacgtcggacgcagcatcggctcgtcgtcagcgtatgcctgccacaacagcgtataaaaatagggcaacagccgatagcgcagttcaatcgcctctcgcaccgccgtcgtcacctcgggatacatccacggctcattcaccgtgctgtcatcgttccacgaatgaatggtaaagcgtgggtgcatcacaccgttctgcacccagcgcacaaacagttctgcctccggtttcggacccgcaaagccgcctacgtcatggccgacgttgtataaccccgacaggctcatacctaatcccatgcgggtgttgtagcgcagcgttgaccagtcggtgcggttatctccgctccaggtctgcacataacgctgcatgcccgcacagccggatcgagatatcaggtacggccgtttatgcggggcaaattttagctgcgcctcgaaggacgcacgcatcatcagcaacggcataacagggcgaatatgcttgatggcgatcggctccccaaaaccgtaacaacgcgcgtcgccgtcccagacttcgaactcgttgttgtcattccaggtggagtcgatgcctttctccagcaactgacgcgtgacctgtgcctgccaccaggcgaaggtggccggattggtgaagtcgagatgcgagccttcatcgtcccagaagctggagcgttcgggcgtggccgtttctgaatcttgtataaaaagcccctgctcggccacctcggcatacagcggatggtcctgtaacaggcaaggtttgatgttcgcggccagtttcagtccggcgtgatgaaacgcggcggtcatcgcctcgggccgtggaaacttgtcatggttccagttgaacacatagcgtttgtcgtttatcgaggtatagcctgacgacagctggaaggagtcgcacggaatacggtgctcggcacgcaggcggataaacttcatcagctgctgctgggcgtccggcgcgtcggtgtagtgcatggttgagccgctgtagcccagactccatttcggaccgaagaaggtttttccggtcaggcgcacaaacttcttggtgacttcgagcagcgtagggccgataaacaggtagtagtcgagatcaccggcttcggcactaaagcgtcgataaggaagatgatagttatccagctcgttccccaaatcgaaacggcagctgcttaaattgtcgtaaaacagcccaaagctcacgccttcgtgtcgcgtcagggtaaagggaacgtgcttatagagcgggtcggtgctggccgcgttgtagcccatcgcgtcgaggttgcgcatttcgaagcggcgaccggtgcggttgagatccccgctttctcgccgaggccgtagtaattgtcctgcgcatagcgacgctggaaatgttccacgccctcgcccttcgacggcagcaggtacgcccccgttggtctgtcgctcgcaatcagctgccactctccctcttggttaaggccttcccactcgaggcgcagcggctggtgaacggtgacccgcagctgggatgtcgccaggcgcagctggttctcgctttgctcaaaggtaaactcgggcagactgaaaccggcattgctcaggcgatttcgcccctccaccggcacgtcctcctgtggcgcaatgctccaggttctgttgagttccagccgaccttcgcgctgcaaaagtacccgaaacagcccctgttcgagcacccgcaggctcataatatgcttgccgtcgacgcgcaaatctatgcctgcctcgtggcgcttctcgagttcccaatgttttaacgtcttcatgcatgctccccttttgctggattacgacgttcagcaatcagcgcaatcaagaagactgcaccaactaaatcaaaaaatcccatggcgataaatagcggattaaaaccgatgttgtcggcgactgcgccgatcagcagtgaaaatagaaaactggcgatccacgccgaggaaccgcgcatgccgttgaccgtcgcaacctgatttttatcgaaagactcgaccaccaacgcgctcaacatgcaggagataacctgatgcccaaatccgccaatcgagatcagcgcaatcgccaggtagggatctttcgtcatcgcgacgaaggctagcgagaccatcatgaatgcgccggtcacggaactggccaccaccgagttgatgcgcgtgcagtggaaccatttgcggtaaagcgtggtgaggtatccgctcgccacgctgccgatatcggcagcgagaaacggcagccaggcgaacatggcaatatgtttgaggtccattccgcgatcgttggcgagatacaacggcacccaaaagctaaagacggcccatgcgggttcagccagaaaggccgggatagcgatgccgtagaattttttgtttttactcacgattttcagtgaagcaaggaacggcaggcgcgactgctgcggctcgttgtcctggcgaatcaacgccagctcgtctttgctcaggttaggatggctctcgggctcgtgataaaaacgccaccacagcaccacccacagcaacgctagaaaaccacaaaacagaaaagcaccacgccagccgaaggacagatgcgcgatgaccacaataggcggtgcgagcatcgcaccaatcgaaaagccgacccccgcccagcctgcggccaccggcctctctttgcgcgggaaccagtcagaaatcgctttggcattggcgggcgtggcggcggcttcggcgctgcccatgaagaaacgcagcaccgccagatgtatccaactgccgacgccagcgtgcaacatgcacaccactgcccaaacggtagcgaaaatcatgaagcccagcttgagcccaatgacgtcaatgacccagccacacagcggctggaaaatagtgtaggccagctggaaagcggccacgacccaggagtagtgctcggtgctcatgttcaggctggttttcagctctggcgccagcaggccgagagagttgcgcgttatgtagtttacggtgaccccaagcagaaacagcgccagcatccaccagcgtagcgccttgaactttcttcgtccgacaacggccgtcgaagcggtgttgatttcagttgtcatgcctttctcccatccgtcattcagtgtgcagatgatgtttatgtcaggtactcaggaagagtaggcaggccgatttgtgagcgaaacgtgattttttgcaaaagctttcacgctataacttcatcaccgaaacagggtcgtccgagagcttatccactcggcctcgcctctggtgaaaaaatttgcatggatgaatttgaaggagatcacagtttgaaaggaaagttaaatatccagcaaattgctgaccaaacggggctgtcaatcagcacggtttcacgggttctggccggaaaaagcaataccagcgcgcaggcacgacagcgcgttttggcctgtgctcgctcacagggcaccctcgatgacctctcgaccggcagactgatgctcaacaacctcattttgtttgctccggcacgggcgttcgacgtgcgtagcgatatcttttactacaagctgattcaggggatcctcgccgctaccgcacaccacgaggtgcgggtgcgctatttcgcgatggaagaggagaacgccgatgcggcgctatttatcgccaagatgactgacccgctggccgacgccgtactgctggtcggcatcgacgatccacatatccatcagttggccaatgacgtcggcaaaccttgcgtactggtgaactgtcaggaccggctgatgcgccacgacagcgtgtcacccgatcatcaaagcatgggtgacttcgcctgtgactatctttttgcccaggggcatcaacatatcgtgacgctacaatgtctgcgtcggcagaccatggaactgcgcctcaacggcattaaaaacgcctttacacgcaatcatcaaaccttcagcgacagccagcatttgttgagcacatcaggatttggcgcgcaggaggccgagcaaacgctgcttgagtacatcgacagtctggaagatggtgcaccgctgccgacggccattcttgcgggaggcgactttatggcggcgggtgcagtggcggcgctgcgtaagagaggattatcggtgccgcgcgatatcagcgtcatgagcaccgacggctttaatctggctgaaattcacgacgttgcactgacggcggttcaggttccccgcgacgagctcggcgcagaagcgattgctctgttacaacgacgcatcttccgcccagacgccccttcaccactcagctgttgcagggcaaactggtggtacgtgagtcggtcagaaaagccagtgcgcgaccgatcgcactgcgtcagcaccaactttatgatccccagccgaatcgccaatgatcaacacaccaggtcctgcatcaaactaaccagaaagcagattcggattaacacatcacaccggtaaaaaatcccctcagccctgcggttgaaaatataaaaaaggccccctcataagcagggagcctctaaacaacgctggtgatacctttactaggcaggaacttcctgtgcggcggcctcgcgtgaccagacgcggtgtttcttcagcacctcgataaacttgtcggccacctgtttggcatcgtcatccacaatgacgccttcatccggtttcggcagcggcagcgcctcatacagcttcaacgcatcgccctgtaagccgatcgccttcaggtgcttgaaggcctgaagcaggtagttcttggcattaccatttttcttcagagcctcgatgctgtccttgccggtagcaacgatgacgccatcgaccagcaccgaagggttaccctcaatggtgccgtcggcattcaccgttttaccctgcagcgttttgattttgcccagacgtggcgcaaaaatcttggtatgaatccccagcgcgtttagctcagcggtaattttctcaaccgaatcaccgcagacgccgtcggcaaccagaatcgccacctgacgggacttcaccggatgcactttgtcgccgtacaggctcaatgcgtcatcttttttcaggccgttaacgtctttcgggatcggatgcgcacgctgctcgtcactcagctcaaggccgatatttgccgccacgcgggccgctaaatcaccatcgatataagtgagttcatcaacgacgcgctcacgaatccacggacgcacaactttgcccaactcgaagctgaagccaccaacgatatgatcctgctcgaattgggtctggctctgccagaacagacgcggctgggaataatagtcattgaaggattcgcttctgatgcgcaccttctgcccgttcagcggctgtggagaggtggcgaaaccgccgtcctttttggccggcggcgtttcacgcggccagttgttgttgatggagttaggctcgtagttcgctttacccgaaatccccattctgtgcatgccgtctcgctgatgattatggaacgggcacacgggtttattgatagggatctcatggaaattggggccgccaaggcgactgatttgcgtgtccagatacgagaataaacggccctgcagcagcggatcgtcggagaagtccaggccaggtacgatattgccgggacagaaggcgacctgctcggtttcactaaagtagttgtcaggattgcgattcagcaccatcttgccgactatctgcaccggcaccagtgattcagggatcaacttggtgggatcgaggatatcaaagtcatatttgaattcgtcctcttccgggattatctgtaggccaagctcgaactctgggaagtcgcccgcctcgatagattcccaaagctcgcgacgatggaaatcaggatccctgccggtcaacacttgggcttcgtcccaaatcaacgatgccgcgccacaggtcggtttccagtggaatcggacgaagtggctcttgccttcggcgttgatcaacttatagcagtggatcccgaagccctccatcatgcgataactgcgcgggatacccctgtcggacatcgcccacatcacgttgtgcagcgtttcaggctgtagcgacacgtagtcccagaaggtatcgtgggcactctgtccctgcgggatctcattgtgtggctccggttttacggcgtgcacaaagtcgggaaacttgatggcatcctggataaagaatatcggggtattgttgcccaccagatcaaagttaccctcttgggtataaaatttggtggcgaatccacggatatcccttaccgagtctgccgaaccccgagcgccctgtacggtagagaagcgtacaaataccggcgtatccagcccaggatcggtaaggaaacccgccttggtcagcgcatgcagtgactgataaacctgaaaatagccgtgtgccgccgcaccgcgcgcgtgaacaatcctttcaggaatgcgctcgtggtcaaagtgggtgattttttctcgcagaataaagtcttcgagcagcgtagaaccgcgtgcaccggctttcaacgagttttggttatcagagattttgatgccctgatcggtgcgtaatgcctggccgtccgggtcttcacgataagcatcaagttgttctagtttggcgttggtggtcgatggggttttatcactgcctgcaaaggtcggctccgcaccgggtggactcacgcttttttgcggttttatcggtgcgcctttcggggcagtgtcttccagatggggtttcacagaggcggttttgttttccaggtcaccatgtttacttcctgtattatctttatgatctgacattaacgactctccatttaatactcacaaaaaaaagggttaccaaaaaattatagtcactgtgtcagggactgcttttttagggccttgtgaaaagtgagagcgcaggaaaaatcggcgggagagcgggtcatgctgggggctggagttaacaataaaaaactgcatcttaatgtttcagactcgagtccaaaagttgggatgcagttctgtttatcgcgttaaagggtcgcgattattttttcttcaggtgcgacatcagccgtttacgcttacgcatctggtttggcgtcagggtattacgcttgccttcaaacgggttctcaccctctttgaactggatacggattggcgtacccatgatttccagtgaacgacggaagtagttcatcagatagcgcttgtaggagtcggccaggtctttcacctgattaccgtggataaccacgattggcgggttataaccccggcgtgggcatatttcagcttcacgcgacggccgttgaccagcggtggctggtggtcgtctgccgccatctgcataatacgggtcagcatcgaggtgctcacacgtttagtcgcgcagtggtaagcctcgttgattgattcgaacagattacctacgccgctgccgtgtaatgcggagatgaagtggatacgcgcgaagtcgataaagccaagacgcaggtccagggtatctttcaccgcatcacgcgcttcctgagacattccgtcccatttgttcaccgcgataaccagtgagcggccgctgttgaggataaagccgagcagagaaaggtcctgatcggaaataccttcgcgtgcgtcaatgaccaacagcaccacgttggcgtcttcaatcgcctgtagggttttgataaccgaaaacttctcgacggtttctgtgattttaccgcgcttgcgcacaccggcggtgtcgatcagcacgtattcacgctcgtcacggaccatcggaatgtagatgctgtcacgggtggtgcccggcatgtcgtatacgacaacgcggtcttcacccagaatacggttggtcagcgttgacttaccgacgtttggacggcccacgatcgcgagtttgataggcaaggtagtcgggtcgaagtcttcttcaacgtcggccgggatctcgtcttcgttctcgcccagttgctctgcccagtaagcggcgttggcctcttcttcggtcagctcgacttgttcaggtttttcaccgacgaacggcaccagcacgtgctcgataagctgcgttacgccgcggccgtgagaggctgcgatagcatagacgtcgcccagaccgagagagtagaaatctgcggtcgcgctgtctgcgtcgagaccgtcagttttgttggcaaccaggaaagtggctttttcacggctgcgcagatgctgggcaatgccctgatccgcaggcatcacgcccgcacgagcatccaccatgaacagcacgatatctgcttcttcgattgccagcagggattgacccgccatgcgagtttcaacaccgtcttcggtaccgtcgataccaccggtatcaacaataatgaattcgttgccctcgatttcggcacgaccatacttgcggtcacgcgttagcccggggaaatccgccaccaacgcatcacgcgtcttggtcaaacggttaaataaggtggatttacccacattcgggcgcccaactagcgcgacgacaggtatcatttttgaagcctcatttttttatagccgataaacatgcgtaacccgacgggctacaacatccaaccgctataatgcaaatcattaaaattcaatttcttacaacagaaaaggggtaaccattcttgctgtttttagaatacgaaacggcccctgagcaattcaggagccgtttagtggcgtagctattatacccgcatcttaaatcatttgggcatataaccaaagcatatacccaagtaattgacgctgtagccagggtgcgtgagcaaagccaacgccgctacagcgtccaggacgcaggggattaacgctggaaggagtaaacctcgccgcctttagcctgcacaaccagcttgtcgcttgccacaatcggcgcgctcaacaggccagaggagtccactttctgttgggcgacaaagcgaccatcattggtgttcatccagtgcagatagccttcagcatcgccaaccaccagatagccgttgtacagcactggagcggtcaccagacggtgaagcagtgcgctttgcgtccagatagtgacaccaccctgggtgttgagtgccatcacgcggtcattctggtcgaccatgtaaatacggtcaccgtcgatcacgatgttgttaaccgaaccgacgtcacgcttccacatgatctgaccggagcgaaggtccatcgccaccagattgccgttgtaggcaacggtgtatacgacgccgttaacgataacaggcgtggtatcgatgtcgctcagacggtcgatttcggtcgcaccgcttggctcagaaatacgttgctgccagatcatctggccttctttcaacagcaccgcgctgacgcgaccgttgtcaccgccaacgatggcagccccaaaggcaacggctggcgccgattcaccacgcagggaaagcgttggcatatcgaggttggcgctccacgcgatgctaccgtctttctggttcagcgcctgcagaataccgttgctggtgtgaatcaagatcagaccgccgctgactaccggacgagaaatggcttcaccggctacggttgttttccacgccagcttgccgtcagcggtgttcaacgagtaaacgatggctttttcgctgccaatatacaggtttgaaccgtcaacggtcacgccgccagagagctcggcggagatgttgctagagaagaagcccgggttttcggacaggtcaaccttccacttctctttgccgttgctggcgtccagcgccttcacgataccaaaacggtcggcggcgtaaatggtgttgtcttgccaggccggatgcaggtgagaataatactgacctacgccatcacccacggaagtgctccacacttcggtcggcgtgaactgattttcaacttttggcagcggggacattttaacgacgtcttcttcgccgccaaacaatgaacagccgctcagcagggcaacagaaacccatcccaccaagagtgttttacgcaattgcatcggggttccccttagctggataagttattcaatttcatacgcagcatagtctgcagcgtttgagatggcttggaatcaaggcctttactgtatgcatccctggcacctttggtatcgcccttcgccagaagaacgtcaccgcggacctcttgttgcatcgccatccagccgtcgcccttgacgttgtcgagggttttcagcgcgtcatccagcttgttttgttgcagctgaacgcgtgccagacggtagttaaccagtgataataagttttcgtctttagtcagctggctcgcctgcgtcagttgtttttcggcattaacgaaatctttggcctcaacgaagtgatcggccagctgcaaggcagcaaaaacgccataactgttgctgttggtctgagcaaacttctctaaattggccacgccatcggctttgttagacgtcagcgcagtgcttgcctgctgataagacgccgaggcttcggtcagagcggtgttctcatgagtctgccagtaatgccaaccgcctaaggcagcaatacccacgacgacgccaatagccagcgctttaccattctcggcaaagaagcggcggacggcatcaacctgttcattttcagtggtatagacttccacgtggtccttctccttaacctaacatcgaggccagacgcacagccaaatcgctctgcgccagcgtttcttgctcaccactttgcagatttttaacgacgacctgctgagccgcgacttcgtcctcgcctaataccagggcgatacgcgcccccatttgtcggcacgggcaaactgctttttaaagttgccgccgccgtagttagtcatgactttcagctctggcagtgcgtcacgcagtttttcagccagttgcatcgccgcgccctgcgtgcccgaaccggaagaaatcacgtaagcatcgaccgttggcggcgccttgaaatcaggattaacggcctgaaccagcagcaccagacgctcaagacccatggcaaaacctactgccggggtcgcacgcccgccaagctgctcaaccagaccgtcatagcgaccgccgccacagactgtcccctgcgcaccaagactggtggttacccactcgaatacggtacggttgtaatagtccagaccgcgtacaagacgttgattgaccgtatatgggatacctgcgaggcctaaaagttcacacagacctgcaaagtgttcgcgagattcttcgtcgaggtagtccgccagctccggtgcatcgttcagtaatgcctgaacctctggatttttagagtccagaacgcgcagcgggttggtatacatacgacgtttagagtcttcgtcgagcttttcaatatgttgctcaaggaaggcgatcagcgcatcacgatagttggagcgcgcttccagtgaaccgatagagttcagctcgagggaaacgtgctcggcgatgcccagttcacgccaccagcgggcggtaagcatgataagctctgcgtcgatatctggaccctgtagaccaaacacttcgacacccagctgattgaattgacggtaacggcccttttgcggacgctcatagcggaacatgggtccgacgtaccacaaacgctgttcctgattgtacagcagaccatgctcgatgccggcacgaacgcagccagcggtgccttcagggcgcagggtcagactctcgccgttgcggtcctcgaaggtatacatctctttttcaaccacgtcggtgacttcaccgatcgcgcgtttgaataacggggtctgctctacaatcggcatacggatttcgctgtagccgtaggtgccaaggacttgcttgagcgtaccttcaatacgctgccacagtgcagtgtctgctggcagataatcgttcatgccgcggatagcctggatgttctttgccacgtcagttctctatctttttttataaaaatgaacccgattataggggttttgtatcctgaggttcaatgcggatacgtcaacgcctcatatcgggttcagtctaattcagcccaaagggcaggcgcgctggcaatgcagcgcgagctcaggttacttttcgagatgattgataacgatgcgcttactttgatccatcagggccgctttggcgcggatcttcgcttcaagctgatcgatcatcagctcattatcaaaacgctctctttgacgaacgccgtcttcgtagaaaccactcttgttatgaccgccggtcacgcccaaggtagaaaccagcgcttcacccggaccgttcaccacacagccgatgatcgagatgtccatcggggtgatgatgtcttcaagacgctgttccagcgcgttgacggtgcctatcacgtcgaattcctgacgagaacaggtcgggcaggcgataaagttaatcccgcgcgagcgaatacgcagcgacttgaggatatcaaagccaaccttcacttcttctaccgggtccgccgccagtgaaatacgcagcgtatcgccgataccttcagacagcagcaggccgaggccgatcgctgattttaccgagccgctgcgcatgccaccggcctcggtgataccgaggtgcaggggctgcacgatttgcttggccagcagacgataagattcgacggccaggaaaacgtcagacgccttaacgctgaccttgaactgatcgaagttcagtcggtcgaggatatcgacgtgacgcatcgctgattccagcagggcctgaggcgtaggttcgccatatttttcctggagatctttctccagtgagccgccgttcacaccgatacggataggaatatttttgtcgcgcgcgcagtcaacgactgaacgaatacgcgattcattaccgatattgcccgggttaatacgcaggcagtccacgccgtattcggcaacctgcaaggcgatgcggtagtcgaaatggatatcggcaaccagcggaacgttaacctgctgtttgatgtgcttgaaggcttcagcagcgtccatggttggaacagaaacacgaacaatgtccacaccgacgcgctcaagggctttaatctgagcgacggttgcggcgacatcggtggtgcgggtgttggtcattgattgcaccgcgattggtgcaccatcaccgacaggcaccttgccgacgtaaatccgggttgatttgcgacgggtaatgggtgcttggttatgcatttgtactctccatcgttgcgatcgtcctggcctgccctcttgcaagggcaggccagagtcaagacgctgttactgagcggctaaagtcagacgagcaacacggtttgatttaacaaaacggcttagatcaaccggcttaccttggtattgaatctcgacggcaccaggtgcaccgattttcaatttatacggcgctttacctttcaggtttagcgtttctccgcctttcttcacgccgctgaacaatgtttttccggaagcgtcgttaacctgcaaccagcagtctgctttgaaagtcattgccacagcgtctgcatcagccgcagtggcgctagcctgtgcatcaccggttggcaatgcagaagacggagtctcagccgagttcggctggcttgtagtgtccgcagccggggcctgagtctgcgctggatccgcgtttgcagcggtatctggcgtcgtattcagcggcacagcgttttgcgcctgcgtagccgcagcgttgccagaggcagtcgctggagcagcagattgggctgcggttgtagaagatgcgctaccggtgttcaagggaattgactgcccctgagcattatcctggtttagctgtgcggtagattggtccgccatattggcaatctcttcctgctgcgcctgatggttttgccaccaccatgcgccggtcaggccgagcaccacgaaaactatcaaccaggtaaagcccatcagccagccatcacgctttttgcgcgacttgcgtaacgatacgccctgcatagaagccacttttggcacattgattggcgcctgcttgccaattaacgatgccagttcctcttcaggaacgtggaccagttttgcgtaagagcggatataaccgcgcaagaaagtcggcgccaggtcggttggcgtatttccttcttcgatttggcgaatagtcgaaagctttaggcaaagacgttctgccacagcctgatggctgagtcccaactgctcacgagcttgacgcaggcgctcacccgcggtcactttagtacttttatcttgagtggcttcagtattcattagctaagaactgctggtactgttgggattgtggaaaattccgcgcaagctgcttgccgtaacgttgaacgttgtccggtttgcctgctaacgccgcgaaacgaatttgtaacataagactgtcagcgctggctggcagaacatgttgatatacatccagtaatacttgcgcgtcggcgcgattccctgctttaaactgcccgttggcttgagtcatcaaaggcgtgcctttgtcaggatcgtttttcagcgcctgactcaacaacacttttgcttcatcatactgattagccttcagaaaacagtagcctgcactttcaagactgtcagctaccggaccggaatcaggtaaacgggcagcgatgctaaactgctgttgtgacggtacatactgccctaaactacacaaaaacgcaccgtaattattcaggacagttccattttgaggggcgagctttaacgcttgctggtagcggctttgcgcggcgtcgttattgccgtttttttgctcatacaatgccattcccagctggttacgataatcctgaggcgaggcgtcgaccgcctgttgcagattggcctttgccgcaggcatgttcccctgcgacaaatactccattcccaactgaagttgggtttgaggcgcgcccgaggcggcctcgaccggcggttgctttgaacccgaacaggccgccagaagacagactgccgcgctcgcggcgaagaaccctttccactgcattatcgccatattaaatccttttacccttctaccgataagaagacccatgcaagctcagaaccacgatctatttatacgcttttaaccataatagattcaccggccatttttttcttcaaagtacgtttggtacggtcaataacttcgcccgccagctgtccgcaggcggcatcgatatcgtcgccgcgcgttttacgcacgataacggtaaagccgtagtccatcagcaccttggagaaacggtcgatgcggctattggagctgcggccgtatggcgccccgggaaggggttccatgggatcaggttaatcttgcacggcgtatccttcagcttttcagccagctcgtgcgcgtgctcggtaccgtcgttgatgtggtcaagcataacgtattcaacggtcacgcgaccctgattagcgttagatttccccaaataacgattaacggcagccaggaaggtgtcgatgttgtatttgcggttgatcggcacaatctcgtcacgaatttcatcgttcggtgcgtgcagggagatagccagcgccacgtcaatcatgtcgcccagcttgtccagcgcaggaaccacaccggaagtagacagggtcacgcgacgttttgacagcccgaaaccgaagtcgtcgagcatgatttccatcgcgggaaccacgttgttcaggttaagcagcggctcacccatgcccatcatcaccacgttggtgattggacgagtaccggcaacttttgccgcaccgataatcttcgcggcacgccagacctgaccgatgatttcagaaacgcgcaggttgcggttaaagccctgttgagcggttgagcagaaagtacattccagcgcgcagcctacctgtgaggacacacacagcgtggcgcgatcgccatcaggaatataaacagtttcaacctgctgattgccgacctggatagcccatttgatggtgccatctgcagaacgttgctcaacggcaacttccggagcacggatttcggcaacgctcgccagcttgttacgcagcgttttattgatatcggtcatttcctcgaaatcatcgctacagtaatggtacatccacttcatgacctgatccgcacggaacggtttttcacccattttgatgaaaaactcgcgcatctgtttgcggttcaaatccagaaggttaattttggcgctcaccggggccgctgatttctcagctaattctgctttagcagcattttcagcgcggatgacgttcagggagtcgatttcagacgagctgagaaccggaatatctaattcgatggtactggacatatttttattggcctcgttgttacacgttatggctcgaaggaagtgcgggccttaaatcgcccacgaatgctcattgctcaaaccactacagaaataatgaaacgccccaaagagtaaaacccttggggcgcaacattgtacaaattttaaggcgaggtggctattaatgaaagccagctaatacaaatttattgtatcagccaattagcgtagtaaaccgacctaaacctaacttcttattaacgagcgcagatttcgctttcgtcgaagaagtaagcgatttcgcgctgtgcagactcaaccgcgtcagaaccgtgaacggcgttagcagtgaagctgtcagcgtaatcagcacgcagagtacccgccagagcgttgtctgggttggttgcgcccatgatgtcacggttacgctgaacggcattttcgccttccagaacctgaacaacaactggaccagaggtcatgaactctaccagaccgtcgaagaatggacgacctttgtgctcagcgtagaagccttcagccttttctttgctcagacggatcattttagaagcgatgatctggaagccagcacgttcgaaacgcgcagtgatagcaccgatgtcgttgttagctacggagtttggcttgatgatagagaaagtacgttcgatagtcataaaaaaacctctgtctgactttagagtttgtgcaggtcgattaaatgttaacactgccggaaaatggcgccgattatagggggctaagtaacgcttgcctacaggaataacaacatttgattaaaaaaatgtgtcactgattcactttgtggcgcaaaggcctcattttctataaacaaaatcattaatcaagggtgaaattgagcgtactaacctgactgctctcatccagcaccgacagttgatactggcccggctggcttagcgtggcctgaaagattcgattgtcggcgccgttctccacctgctcgccattgaggaaccaccaacgtttcccagccccgccctgcgactcgattcgcagagagagactgcgttgccccggcagaggcttgaggatcgcgttatcgcgtattcccaatagcaaaagcggctgtactgcagatttgcccagcggcgggcagctcgcgtcatgcggcggcaaacgctgactacggtgctcttcgggcggcagccagggttcgagcggcgtcggccatagcgccacctgagtagcgtgagaattcgggcagttggccgcgacctgctggccctgtgaattgacccacagcgtaatcagactcccggcctgcgactcctgcccaggcgctgggagcgtgggcggcagcgtgccgtcgagcgtccaactttggcgctgctggcggcagttggtgtcacccgccttgagcggctgtccgccgggccagcacagcgtggcaatcccaaccgatggcggacgcgggtcactcaccgccatcttcaggctgtaacgcgcagagctgaccaacaaattgttcacctgattgagcagcggcactgccgtagcatagccgaactgaccggcaaccggcgtggcgtcagggcgccctacccacacgccgatgatatatcccggattcacccccatcgcccacgcatcgcgatagccgtagctggtgcccgttttccatgccaatggaaccgtgccgggcaacgtattgtcgggttgcgggagtgcctgcccgcccaggatacgtcggataatccatgccgctcccggcgacatcaacctgcgttcgaccaaaggctgttgaggttcaaagcgtaatctggcgaccttaccgccccgcgccagcgcactgtaagcctgtgccagttggtctagccgcgatcctgtgccacccaaaatgaccgccagactggggtcactgttagcgggaaaacgcaggtgaataccggcgttgcgtaaattcgcagtaaaacgttttggcccgtaagcatcgagcagttgcacagcagggagattgagcgacctgaccaacgcttcgctggcgctgactggcccatgaaaaccggtgtcaaaattgcccggacgataatccccgaagcgccttggtacgtcttgtaacagcgactccgcagttatcaagccatcgtccagcgccagcccatagaggaaaggcttgagggttgaccccggcgagcgccatgcgctgaccgtatcgacttgcccaaagcggctgctgtctttgaaatcgaccgagccaagataggcctttaccgccatcgtcgaactttcaaccacgataacccgacggaggttttcgccggcagctggttcttccagcctgccgccagctcctcaagctgcctttgcagattagcgtcgagcgttgtggtcacgatggtgcggttattatggctagtgagccttctcgccagcagcggggcaagctgtggcacctgacgcggggcaagccagatggactcctgacgaatctcgtcgacgcgcctctgcggccagacgtgatactccgccagtctggagagcaccttgtctcttgcggcacgagcgcgttcggggaatcggtcgggacgcagccgactcggtgcctgcggtaaaacggccagcagcgccgcctcgcctggcgttagctcagaaggcggtttgcccaggtaggtccagctggccgccgctatgccctgtaaggtaccgccgaagggggcacgattaagataaatttcaagaatttgcgatttcgacagcgtccactcgagctggagagtacgggcaatctggcgcagtttgcccgcaaaagtgcgcggatggggacagataagccgcgcgacctgcatcgacagcgtacttccgcctgaaacgatgccgtcgtgatgaatattttgccaactggcacgcagcagcgacagcggattaatgccgggatgatcccagaaccagcggtcctcgtaggtcaacagcgcctgcaaatagtacggcgagacctgatccagtttaacgggataacgccacacaccctgtgcatcggcatagcgccaaagcggcgtaccgtcctctgcggtcaccactctcgcgaccggcagctcttgcagaggcagtggccagatacggtttgccgcccacagcagcgcgcctcccgtcagtatcagcaggagaaaaaaacgcgcgattctcagccaaaagaagccgcgctcaccgctgagacctttcattgcccgggatctcctcgcctagcgtacattcatctgttgcggtgtcgcaccggtagcccgccatgcaggaacatacatggactcgacctgcggagcaggcacggaatagctgcccggcgttactgcacgggcgagatacagcagtgccacatggcggtagccatcgacgtcgatagcagcgacatagcggtcatctcggtattcctgatgcttgatgttcgcctgctgcatatcgcccatcagttcagtcagtttactggccgcatcccccaggctagcgctactttcggccagattctggttctcgagttcaagacctgcgggcagaagatcgactaccagcgcatccggcacgtgcgtgtcggcccaaacgtcaagatgcacaaccaccagactgccactttcaagcgacgccagtgatatcggttgcccgtccatgccgagataattgcgtttaatatgcaaaatgttgccgctttcagcgggtgcctgctgagggtaaccggtgatatcaaaacgagtgtacaccgcagtatcaccgctgtttttcagcataaccggctgatgcagggctgtagcattgaatgaacgggtcactgccgaggtcgaggacaacgcctgcgaatctccgtctattgtcacctgccacggcgtctccgcgctgccaaggagcccacgaccggccataaacagcgcattgctttcttgagtagacaaccaacgctgaccgttaagactttcggaaagcgtcagcaacaggcggtcgcggacgtccggcaacatattgttttcactcagcagcgacaggatcaacgcattgtcgcgcagcggactgccatagtcctcgagccagtaatctttctctggtcgaactttggcaacgccttcggcaatcgccgtttgagcacggggcatgtcccccatcattttcaacgcaatgcccagttgaaccaacggcaggcccgactgtgccgcactgcgcttgtcaaacagctggcgcagtgcacccaacggtgcctgctgctgaccggcgagcaccagcccagcataagcctgaacggcaaagcgtgtactgtctggctgcgaactgtagcgaacgtctatctgattcgggtcctgcaaatagcgctgcaggcgttttttggccttctccagcccttccgtttgcacgctgtagccctgctgcgcggcacgaaccaagaagtcagtcgcatatgcggtcagccaatactcctcagggctgtctttattccacaggccaaagccaccgctctctttctgcatacctaacagtctgtcgatgccgatatcgatgttgtgacggcgtacatcgtcggtcgaggtcttgattcccaacgccgccagctgtgcacggctggtgtaaagcgacggataaagaccgctggtcgtttgctccaggcagccgtaaggataggccagcagttcactgatataacgtgccagattcagcggcggtttgctgctgagcgttaagcgcccctgtagcgtctcttgcaccagctgcgcattggcgtcagacgacaactgccaggtttctcccggatgaagtacggtcgcgaagttacgcgtcagcgccgggaaagcaggccgcacgccaatcgaccagcttcggtggtagtcctgaagtttctcgttcggcaatgtcatgccgctgaccttgacgctcacctgccccgcaccaaagcctgacagcgctttcacagcgactgacagggttttgcgctcgccttgtgccagcgaaacgctctgcccggccgttgaattgacaagctgaattaagccgtcggtaacgacctcaacgttgaaagtttgcacagcgcccgagagattggtgacatcaagggccagatttgcgctgtcgccatctgccataaagcgtggcgttgcaagctcaacaatgatgggggcagccaccacaactttcgactctgcgctgccaaagtcttcgtcactccagccctgagccatcaggcgcagctcgccgttaaaatcagggatagggatctgtacctcaccgtcgccattgtcgtcgagcgtcacagggactgcctgctgagcgacaatggtcacctcggtaactggcttctgaccgccgcgcgaaagaggatcttcatcgccgtcgccgccaaaactcaggctggccattctgccctttccttcgatcaaatggccgtagacgtcgtattgatcgaccccataacgtttacgccccaggaaggcgtcgtaaggatcgggagtcttgaaacctgtaatcgacaacacgccagcatccaccgccgacagcagcagattaatggagtgtggaaccgccttgccctccaccgaggctttgactttgacggtcagaagctggttcggacgaatcttggctggggcatcgagctgtaggcttagcttgcggccctcggaggctaaaggtatatgcaacaaaccgaccgccctctttggcgtcgactgctgctttttgtcaccgggacgcagtaccagcgcgctgaaatagagatcgtggcgtcgccattcactattaatcggcacatcaatatcgacgcctgcctcaggcacgtcaatctcctgccaccagagcggaccatcgctcgactctaccaacagatagcctttacctgccgccggagcctgaatatgtatttttgcgcgctcacccggctgataggacggtttgtcgagctttagtttcacctgatcggggcgcacggcatccgtaccgtcggtattgtcctgccagctgtagccggcccagaagcgcaggctgctcaactgatgagtttgcggatcttcaacttcaatacggtaagcgccccactcgactgggaagctgacttttgccgaaccgtcggcggcaatatctatctgctgacgggccagcaccagatcctttttatcgtacagcgactgccagccgctgctttcggaccattgccagtaatagtcgcgacgttcgcgcaccagccgaacttcaagacctttcgccgcgagcctctgtgctgctttattaacagaaacaatctcaaaatccgcctggctgttttcatcaaccaccgcctgcgataccgtcttgtcggtgcgatagtcgtaaatatcctgtttgttgaacaaggggcgaataccgggcaagacctccgcaggccagactgcctgactgacccgccgtgttaccggacgcccacccgactccagcaggctggcctgcagaatcaccgtcaaaggcgaacgcaccgtattccagctgttttcaacggtaacagcgcctttcccctcggcgtctagcgtctggtcaacgtcgctcagcgttcgtgagaggttttcttcattgatagccccgaactcatagcccggcaaggaaggtaccgcctcacgcagcggacgcaaatacagctgcccctgaagacgattacccgcagccggtgccccatagagatagcggcccgtgacatcaaaggtcaccgcagcatcgccgagaaccggctcctgactgctgctcaaatctagcgccattcgctctggcataaagtcttcaaccttgaaagggtaatagcgcagctgattatcgccaaggttgaagctgaccttccagtcgccggttggcccgtcttgcgggataggatattggtactggtaaaggccgttttgcggctgccacataaaggtgcgggcaacctgaccatcgggcttgatcagttgcgtcttcaccggctgcgccgtcacgggtttgccgtcagcgtcacgcagtaaggcattcagcagcagtgtttcacccgggcggtataaatctcttggcccaaaggcgaaaagcgttttgctgtaaccctggggtccggcaatatcaaactcggccaggtccagcgccggttcattgaggttaatcagactagtttcgccgccgtgctgtgccaacagcaagaccgcctttggatctttggcgaattgcgcgtgcccgtgagcgtcagtgttaccctgcgccagcgggtggcccttctcgtcaagcgtctgcaaatgaatatctgccagcggtgtgcccgcctcaagcgcctgagtatagacatcaacctgttgactgtagctgtgtaacgaaacaccgatatcactgagggtgaagagcgtcgccggattggtgtaactgtagcgccccgcctgctgcatcacggcaagatagacacccggttgcttcagcgcatcaataccgccgatcggtaatagcaggtgctcgcgggtattaatctgaggatttagcgcaaaacggccggtgtaaaccaaatcggcccgcttcagcagggtgtcagactctccggatgaaagtgcgctgctcgattgccagtcagccagaaactccggcagcgccgcacttttaatgcggaagaaattcacgtccacattattaatattcaaggcgataaccggcaaaccttctgccagtctggtgggcagcagggatcctttgctggcaaacccaacgctaggctcaatattacgggtggtgagggtcttttgctgttcagccccagctgtgcgccgttgagccctttaagagcgccgtcaaccgtgaccaccagctgacggtcaggcaacagatggcggaaacgcagttcggtgagactgtcggacagctcccacgcaccgtctggggttccgcttttggtatcgaccagatgcaccagcgaagcaaaattctgtgccggatcgaggggcacagaaaaggtcaggacccatgcactggcaccgtcgagctgcagctcggaagcatccaacagcgaaagaggctgccccgcactctttttagccaaagcttcacgttgagcattgtcgagcctgggcatcgcagcctcggcggcttttggcgcagtggctttctcagcgatttgcgcaggggcgttttagggggatctttaggtttaggatcatcacagccactcaggcaaagtaacgccaggccaacggtcagtgtctgccagcgcttgcttaacctgcctaatcccaagcctaaagacgtccccatgcgacttctccctgataatagatgtgtaaaaactcactacgcctgaatgcgaataaacatgcgccagccgatttagaaatacaaccacatgttttgaaaaattgcgttaccgcagtacgcaaaaactaaccgaaagacattaattgctttttatgctggaacacatctcccaaattcgaattcaggcctgaagggaggaacagtaaaaaattgacgatttgtataatactagataaattgtcaatgatgaaaaaacagacacccgaacagcaggccaatcaggcgcttttaagccagctcgagcagatagccaaaggcatcggcgaaacctttgcgcccttttgcgaggtcgtggttcacgacttgctggaccccaagcacgccatcctgtcgattcaaaataatctctcgggccgtgagattggcgcaccggccaccgaactgggtctggcgcgcatcaacgaccccgagtatccgcaggttctcgccaactacgccaaccgttttgcagacggacgtcgcgccaaaagtacctcaatcggcattaaagatgcacagggccgctacgttgcagcactgtgcatgaatgtcgatctcaatctttttgggcaaatgcaaagcatgctggcgcagttttgccagacagggagtgtcgatatcactgagacgctggatccggccaatgccgacaccctgcgtgagcacatcgacaagttttccgccagccgctcaaaagcgccacaggcattgaaggccgaagagcgccgccaactgttggccgaattaaaagaggccggttatctcgaggttcgcaaagcggtaagcaccatcgcccagcatctcggcgtatcaagggctacgctgtataacgacgttaaattctgaggaagaaatgaatacactgcctacttttgatgatgttttagccgccgcaaaaagaattgagggctatgcccataaaacgccagtgatgcagtcgagtatccttaaccaagccttgggtgccgaggtctttttcaaatgcgaaaaccttcagcgcatgggggcattcaaatttcgcggagcttttaactcactggcactgctcgatgaagcacagcgtgaaaaaggcgtgatcacctattcttccggcaatcatgcgcagggtatcgcgctggcggcctcactgctgggtatcccggcgaccatcgtcatgccaaaggatgcgcctaaagccaaacgtgccgccaccgagggatacggtgccaaagtcgttgaatatgaccgctatacgcaggaccgcgaggctatcactcacgcactggcccaagagcacggatacgcggtggttccagcttatgactacgcgccggtgattgccggacaaggcactgcggtaaaagagctgcttgaagaggtaggtgagctggacgcactgtttgtgccgctcggcggcggcggtctgctggcaggctctgcgctcgcggcacgcgccctttccccagattgtaaaatctatggcgttgagccagaggccggtaacgacgggcaacagtcgtttcgcagcggcggtatcgtcaaaatcagcacgccaaaaacaattgccgacggcgcacagacaccgtcgctcggccagattaacttctcgattatccaacgcgacgtggacgatatttacaccgccaccgatgcgcagctggtcgacagcatggccttctttgcctcgcgcatgaagcttatcgttgaacctacgggctgcctgggtttggccgcactgcgtgccaatgccgagaacctgcgcggtaaacgtatcggcgtcgtcatcagcggcggtaacgtcgacctcgacaacttcgcgcacctgctagccgagcatgccaatactcaagagacagcgcgatgagatttatctccgcagagcaatgtcgtccagttgtcactcaccggcttgccttcgaggcaataaaggcggcgttagtggctaccgcatcgcccgccagcacgctttttcccgtggttatcggtcacggctcagagccaggcacccgctttacggtcaaatcggcgacccagtcggtgaacgtcccgctgaccggattaaaagtcggcacctactggccaaaaaacagcgaacacgggctgccgcgccacaactcttacatactgctgcttgacgatgacaccggcgcactgaacgcggtgctcgagggtgggcaagttaatgctttccgcaccgccgccgccgatgcagttgccgcacactatttagcgcgtccggacgcctcgcggctggtcctttttggtgccggacatcaggcaaagtacgaggccgaggcgctgctcgagcgcttccctattaccgacgtgctgattgtgaatcgagaccggcaaaaagccgaagcgctctgtgacgctctggcagagaaaggggtaaacgcggggttagcgatgctgaaaccgcctgccggaccgctgatatcattgtgaccgtgaccggctcaaccactccgctgtttcaggcagagtgggtcaagcctggtacccatattgccagcatggggtcggatgccaggggcaagcaggagctcccgcccgcactctttgcacgcgccaggctgtttgccgacctgcctgaacagtcgcgcacccttggcgagtttcagcatgcgcccagggtgtcggaacacgatgatgaatctattacggctatcggcaacgtcattattggcaacgcttttggccgccgcggtcccgaagagattacgattttcgacagctcaggcgtcgcactacaggatttgtttatcgccgccgccatcctgaatgcgctggataacgccggtgcctgatgccggtcttttatgactttttatcgctagccaggcccagactatgactgataataccccgttgaacggcgtcagcattcacgacaaagaaacgccttttctgctgcttaatcgcgacaagctggaacgcaacgttgcgcgactgcgcgaacacaccgacagtttcggcgtgccgctgaggccacacctgaagaccgtaaaatccgttgaggcggcgcgtttgatccttactgagggtaacgggccggccacggtttccaccttgaaagaggcagaggtgttcgccgccgctggatgcaaaaatctgatttacgccgtgggtatcgcaccgcaaaagctggcccgcgtggttgccttgctaaaagacggcaccgatatcagcgtgattttagacagcctggagcaggcgcgtgccgtcgctgactactcccgccaggcgagcatcgccatcccggcattgattgagatcgacagcgatggtcatcgcagcggcgtagcgccgggcgacaatctgctgattgaaatcggccgcattctgcatcacgacggcgctgagctacgcggcattatcactcatgccggtgagtcttatcactgcaagagcctggaggaacatcaggcgatggcagagaaagagcgcgccgccgccgtggcctgtgccgatgcactgcgtcacgcgggtctgccgagtccggtcgtcagcgtcggctctacgccgaccgcgcatttcagcaaagacttgaccggcgttaccgaggttcgtgccggcgttttcacgctgtttgatctggtgatgaccggcgcgggcgtctgccaaacctcggatatcgcgctgtctgtagtggccacggtgattggccaccagcgtgaaaaaggctggataatgattgatgccggctggatggcgatgtcacgcgacagaggcacggcggcgcaggcggtcgaccagcgttacggcatagtgtgcgatatggctggcaatccgctgggcgatcttctgatggtagacgctaaccaggagcacggcattgtggcgctgcgtccgggaagccagcaaacgctgccttatctcccctacggcagtcgggtgcgtatcctgcctaatcacgcctgtgcaacggtcagccagcacggtgaattcgccgtcatacgcgatggaagtgaacacattgaggcgctgtggccgattatccacgggtggtaagagtaataaaaaggccgcacagtggcggcctttagcgggataccttatctcaggctttgcccgacgaaggaatgatattgcgtagccagcttccccacttgcgctgataaaaaggctgagtatggctcaccagataatggctcagccccctctccttctcattcacaatgcagaaatctaccgggctgtcgtctggcgaggtttcagccgcgacgttgcccgcttcacggatcaacgcgtcaacttccgcctcggtgccgtcagcctcgacgccaaccagcagattgggttgcgggtcagcggccttgtcgtggatcaacgccaggaaggcacggcgaaccggcttcttctggctaaaaagcgtggtcagcgcgtcaaccatcgccgaagggtattgttccggctgaccaatcagcagctgactttcggcgtccagcgtcagctcggccggtgcggcgagcccccggtgttaagcagcatggtgatttcgcttggatacagctctttgccgtattctgacttagggttgagaaacagctcttcaccctgagtcatctcaaagaggatacgcgctggcagtgcgacgaaagactgttcgtcttcactttctcccgcgacggcacgctcgagcacctcgaccgacgaaaacacaggaatgatcgaactgccatcctgtttttcccagtgcagcagattcagctcgctaccggcagagatatcctgttgaatttctgacgcttcctgcccggcatcgcccaaaacccacaccgttgactccagcagcttctgatagaaagctgggcgatacgccgcctgtgtcacagaaagcctgagcaaacgctcaagttcattttcatcctgctgcgaggcagcaggaatatcgtgcgggacgctcatagttatttcgctttggctaacagcaagttagcaacggtacgcacacccaggccagtagcgcccgcagaccattggtcagccgcgctcttacggtaggttgctgaacagtcgatatgcagccagcctttcttgtagtttttcacaaagtgagacaggaatgccgcagctgtgctggcaccggcaccgtagttagggcctgcaatattgttaagctcggcaaagtttgacggcagctggttgcgatggaactcagccagcggcagacgccagaacggctcgtgctcttcggcagcgctggacaacagttcggcagccagcgcatcgtcgaagctgaacagcgcgtggtagtcgttgcccagggcggtttttgccgcgccggtcagcgttgccgcgtcaatcagcagcgtcggattatgcttggaggcatcaatcaggccatcggccagcactaagcggccttcagcatcggtattcattacttcaaccgtcttgccgttgcgatagtgaatgatgtcgcccagtttcagtgcgttgccgcttaccatgttgtcagcgcagcacaggtaaagtttcacacgtttgttcagaccgcccgcggcggccagcgccagtgcaccggtcagcgtcgccgcgccccccatatcggccttcatcgagtccatagacgcgctgggtttcaggctgtagccgccggtatcgaaggtgatgcctttgcctaccagacacgcgaaaacaggcgcttccgggttaccggtagggttgtagtccagagacagcagaaccggtggacggtcagagccacgccctacggtatgcaggccgttgtactctttttcgcgcagctcatcgcctttggtaatgcgatagctgatcgagtcaccaaattcgcacagcagatcaaccgcgctgcgagccagtttttccgggctcaagtcttcagccggtttgttgatggtgtcacgcacccagtcgatgatcttcaggcgctgttgcaggctctcggtgtccgcttcagacagttcggcccactctacgctgcgggtgcctttaggaccacggaagccctgccagaacgcccagctgttttcgagatcccaacctgccccttcaagcttcacttttttcacgccctggccatcaatgcggcgcccggcgcgtgcaattgaggtcagcgtgtcttcagccgtgaaatggatagtaataccttcagaatcagtacttaacagggccttttcgccccaacgcgcgtccgcaggttttgaagacagtagaacaggcattacatcattagtggtcgctttagtcgtcatgactacactccaaatttgttaggtttatcttcaatgattagcgttagaaagctcacgcaggcggcttattgatttttctataagcgaaatactgtaatcgatctcttcttcggtggtaaaacgccccaccgagaaacggatagaactgtgcgccagctcatcattaagcccaagcgccttaaggacataagaaggctcaaggctcgccgaggtgcaggcagatcctgaagaaaccgcaagatccttcagggtcatgatcagcgattcaccgtctacgttggcaaagctgacgttgaggatgttgggcgcggtccggccttcacaaccgttgaggaacacgtctttaatctggcgaataccgttccacaagcggtcacgcagtgcagacaggcgtagcgcttcttcggtcatctcttctttcgcgatgcgataggcttcacccatgccaacaatctggtgcaccggcaatgtgcctgaacgcatgccgcgctcgtggccaccaccgtggatctgcgcatcgacgcgaacgcgcggtttgcggctgacgtaaagcgcgccgatccctttagggccatagatcttgtgcgccgagaaggacatcagatcgaccttcagctcggcgagatccaccggcagtttaccgacgctctgcgtggcgtcgacgtggaacaggatctcgcggctgcggcacatctcaccgattgccgcaatgtcctgaatcacaccaatctcgttgttgacgtgcattaccgataccagcaccgtgtcatcacgcagagcctgttccaactgttgaagatccagcaggccgtttggctgcggattgagataggtgacctcaaagccctcgcgttcaagctgctcgcaggtatccagtacggctttatgctccgtcgtgctggtaacaatgtgtcggcctttatgcgagttggccagcgccgcgcctttaatcgccaggttgtcagactcggtcgcacctgaggtgaaaatcacctcgcgcgggtcggcgttgataagctctgcgatgttgttacgcgccacgtcaaccgcctcttccgcctgccagccgaaacggtgggaacgggaggccggattgccgaaagtaccgtccagcgttagacactgcatcatcttttcggctacgcgtgggtcaaccggcgtagtggccgaataatccagataaatcggtaatttcatggcaaaagtgctccgtacagcacgcgccaaaatgaacgcggctttctttatatacgagctagtttaaaacggcttgaccaccggttaaaagggaaatcatgccacagaagaggttcagagcagaatatgcttattcaggcagtgcctatagcaaaaaaaggacaaaagaaaaccgggcgacaaggttgcagtgacgaagagtctctgtcttgttctacccggtttgtctgacgctagcgttggctgaggtcggttattctgcggttggtgctgacgaattcgaatcaggcgcgcaggttaacgttgatggtttcttgcggacggccattcggcatgcggcgcaggtcgttattctgacgatcggccacttcaagcacgtcttggttgttaaccagttcaccgatggtgatgtcattaaggaagccgctgatgcgctcgctcaggtcacgccacagggtgtgagtgaggcaacgttcgcctccctgacagccttctttaccctggcaacgggtggcgtcaacggactcgtcaaccgcggtaatgactgcaccgacagagatttcaactgcgtcacgacccaacagataaccccgcccggaccacgaacgctggcaaccagttcgtgtttgcgcagacgagagaacagctgctccagatacgaaagagagatgccctgacgttcagagatgtcggctaaaggcacggggccttcctgagaatgcagtgccacgtcaagcatagcagtaacagcataacgacctttagatgtcagtctcataacatgattacctgtcagtgaaattcaaaaaatactaatgggggacaacatggaaagaagtctgacattcccgactaatttagtcaactatttaacctagtaatttactcaagtattacatgcatcgttttcggggttattttatcccggcaaagttggcatgtaatactttgataaacaaccttataacagaatgaaaatgcttattctttatcgtttttttgcttctcgaccgacgacaaaatgccgcgcaggatgttgagttcctgtgcttcagggcgtgcgcgcgtgaacaaacgacgcagtttgctcatgacctgacccggatgttgcttgcgaataaagccgacttgcagcaggacttgctcgaggtgctgataaaaacgctcaaggtcatcgaccagcggataaggcgtttcttcgtattcaacctgcggcttggccgcttcctgctgcgcaagccaggcaacgcgaacttcataggcaatcagctgaacggccatcgccagattcagtgagctgtattccggattagcaggaatgcagacgtgataattgcacttttgcagctcttcgttggttaagccaacgcgttcacgaccgaataccagggcaacaggcgcggtcaacgccgttttggcgctgtgctcgccacactcgcggggctcgagcatcggccatggcagcgtacgggagcgggcgctggtcccaatcaccaggctgcaaccggcaagcgcttcgtcgagtgtgtcaacgatagtggcattaccaataacgtcgctggcgcccgcagacatcgagatcgcctgcgaatcaggtttaacgagtggattaaccaagtaaaggctggataatcccatggttttcatagcacgggcggtggagcccatattcccggtatgggaggtttcaaccaggacaatgcggatattgtgtagcatacaaactctgagcgttgcggaaaatcgcaacagtttatcacaaaccgtggccgcgtcatggtttaggctgtgcggcgttggcatgttataaaaaagcgcttcccaaagtcgttggcgtttacaataagtattgctatactgcgcgccgtttcccgttctttaacatcctagttggaagatatccatgcatccgatgctcaccatcgccgtgcgcgctgcgcgtaaggccggtaacttaattgccaaacattacgaaacgcctgattctgtagaatccattcagaaaggttctaacgactttgttaccaacgtagatcgcgatgcagaaagcatgatcgtcgacgttattcgcaaatcatatccaaaacacaccatcatcggcgaagagtgcggtgaattggtgggtgaagaccaagacgtacaatggattatcgacccgctggatggcaccaccaactttgttaaacgtttccctcatttcgcagtatctatcgctgtgcgcattaaaggccgcaccgaagttgccgtagtttatgacccaatgcgtaacgaactgttcaccgccacccgtggtcagggcgcacagctgaacggttaccgcctgcgcggcaccagcgcgaaagatctcgatggcaccattctggcgaccggcttcccattcaaagttaaacagcacgcaaccccgttcatcaacgtggtaggcaaactgtttactcagtgcgctgacttccgtcgtacgggttcagctgcgctggatctggcctacgttgccgctggccgcgttgacggtttctttgaaatcggcctcaagccttgggacttcgccggtggcgagctgctggttcgtgaatctggcggcgtggttaccgacttcgttggcggtcacaaccacttctcttcaggtaacattgttgccggtaacccgcgcgtcgttaaaggtattctgactgcgatgcgtgacgaactgagcgaagcgctgaagcgctaatcagtttgtaatgaaacagggacgctgcggcgtcctttttttatgcctgtttttcagcatcaggacgcggcgggcgcgacggtggatcgtttaaagataagccgcctttctatgagacgataggatatctcgcctacgataacggccaccatgaaggtgacgacgcctaatacgatgagcattggcgtgccgaaccggccagagcgcgccagtaccgtataggccatcgcgacaaacccgtgcgttaaatagagcgaataggaagagttgccgatttcgaggacccatcctgagacctgcctggcggtaaatatatagaggaagaaaacgatcgccgcgagataatgaacgtactgggcatagtcacccattgcggcatctttcagggtaatcgttgctaacaggacgcagaacagcagcagcagaagccagcgagatgccttggtttttatcgcctgaaggagcctgtgctggtactgaaagatcaacattcctaccacgaacagatagatgtcatgaattgaaaagaacgattgggccgtgggagaagtgacgaattcagacaaaatatttaaaagaatgaagaaggcagtcagtatgtagatgccgcgcttgcggtgtttgtcgaacaagatgagcccagcgaaggcgagatagtaaaaggcttcgtagattagcgtccagccctggcgcaggataggatcaatgacatcgcctttgaatgagatataaggcagtaataaatacgaggcgattattttcccggaggtatactcatgggatttaagtataaagccaaaataccatagaccaatgagcacgctggtccatataaaatagattgggtatattcttaccgcgcgcttgaaaataaacttaccggcattttcccctcctcctgttttatttaccgtcgtcatcgacataatatagccgctgataataaaaaacaccccgacgcccacctgccccaccagcaccagattattcaatatgacgctcataaaaccgccgacgtctttaaactccgtgaaggtagaaagtgtatgcgccatcaccacggacagtgccgctgcgcctctgaggtactgtatattttcgttagtcttcatctatagtattccccggacgttgtggcaaacacgaaaggtaataactatttaacagttaagctgaattgataaataaagtccgaaataaatactgagtcagagaaaacgccgctaaggttaagaaaaccgcataggtaaggcaggaaaataagaggtgtaaaaagagtcagacggcgagccttgaatataagcttctttttataaagtaagcaagatgattatattttaaatcaacaaagcgttataaattaaagagctgaatttttatttattatcttcagctcttgataatacttttatcagtgtccgaacggccccattcctccgccgaatgccgaggcgctggtctgatagagcatcacgccggccgcgataaggataagcccaccggttaatgagagcatcgcccaaacaagcggaacccaacccgacgaggcgcgattggcgctgagcctgaccgcaagttcacggctatagaacaccagaaagcccaccagcgacacggtcagcgaggtccccaacgccatcaccagcgccgacagcacgccccacatgtaaacgcctatcaccttcgaaaacagcagcaccataatcgcgccggagcaaggccgaagccccatggccagtacgaccgccgcctgagtacgccagccggtccccgcctgaagctggctgtcacttggcatatgctgatgaccacagccgcagttttcatgatgttgatgagaggccgtcagcaggctattttccgtggcaggacggatccgctgaatcttaatccccacagacgaagataaaacctggcgtctgcgcgccgcctttagttcggcgattgccttgccaatcgcccgccagcagaggatagcgccgagcagtatgaccagaacgaagctgcctttctccagccaggagctgctctgatgaagctgacgtgaggacaattgcaggacgcctaacactagcgtaaccagcaataccgcaaccagtccctgtacgacggcagaggcaaaggttagccgcagactgtttttcagacgtgagggatgcgtggcgagataagtggtgatcacgaccttgccatgccccggccctatcgcgtggattacgccataaaaaaggctaaacagcgtgaggctgaggcctgcctgcgccggatgggtttttacctgttgcagaatgctggcgagctgctgatgcaggtcgcgctgccagatgatgctgcttaacaatatgcgcggccataagtgccataacacgccgcaggccacgcccagtagcagtaaaaaaaacgccaatggccagaaaggcagcgccctgcgccatccagcgacgcggtgttgagactgcgttagggtatcttttactgacattgaagcgttaccttttgtgcaaactgctggccaagatccatgtcttccggcggcgcatcggccttatccagcgataaggcgtaggcctgcagcgacgcgttgggggccggggtaaacagcgaaattttacacgccgccgccgcgtcagccggaagatgcaacgcctgtgcgcccttgtaggtcatatcgacaaaatagcttgggtcgaaggtggaaatcagcagcggcttgcccgctaatggcgcaggctcggccaacggaataacaaactccagcaccgccttgtcgccgctgcgcgagagggtatattcgctcggcagacgcatatagttaaccggcttgccgtcgcgatagacattggtgaaataatgttgagccatcacgcgcgccatgacctctgccgccagtttcttccacactacggagtccggtgttgccttgcctgcgtcatacaacaggtcggcggaggtaatctcgtccatcgtccagaccattttcaggccaattaaatttttgtcgcgggtcaccagagtcgtttgcatatcgataaaactgtgcggatgcgcaaacacagacgtcgagacggccgctaatagcgcaatgcctgttagtcgacaggctgttttcagggcatgatattttttcatcgggcgcgatttttgctgttccaaaagggtgtccgaaaaccaataactcacaaaatttgttataaagtaacattttaaaacaaagcaaataagctactcacgataaatatctgtgatctgagttgtaagccggtgtaaaagcccgcgccgtaccgcgttgaaacagcaatggtttgctatgctattgaagaattttcaataatgcgaatacagaaggtgatatgagcctggacacctcccctgtgcctgagctctcagctcaacaacgtcgctgcaatctattgttgatgctgtatgcgccgttagaggcggtacaactggagaacgtcggtcaaatcaacggtgtggacctaccgactacgcagaaggatatagcgcagctatcggccgacattcagcgcctgcatcggctggaaatcatcgtgaccggcgaacagcattgtcagctatatggcagccttctggataagcgcatctgcctgattgacggcctgcggcgagcaatacgcagtagcccagattttgttaaccgccgtttctccccgcagttaaagcagctcctcagccaaatgcccaacgtcgataatgtccactatgaggagcaattcccccgaattatcgagcgtctgagtcagcagttgaaccgtgagttcaccggacgcgatgaacagttcctgcgcctctttttgcagatttgcctgtggcagaatatcagcccgacgcagcttgaattcaccgaccagcaacgtttgtggctgcacgacaaaccggaatatatagcggcctcactggtgttcgacaagcttcaaaccctgtgcgccgaacctattgccgaatgtgaacgcgacttcattacgctgctgctgaggctgattaaaaatcacagctatgaaagttcggggtcggacgaagaccgaaaactgatgcgcgagattgaagaactggtggcgcattttcaagacgtctcaggtatgcgatttagcagttacgaggggctgataagtcagctatttgcccatctggggccggcgattgaacgctgccgttttgctatcaccgtggacagccagatgcaggacgaggtcaatcgcatgtacccgcgcttgatgcgcaccacccgcgacgcgctggaaggtttcaaagacgcttatcagataaccttttccgatgaggaagtcggcttggtggcggtcatttttggcgcctggctcatgcagggcaacgcgttgcaggagaagcagatcctgctgctgaccgacgctgatgcggaacttgaacaggcggtagagcaacagattcgtgaggcgacactgatacctttgaatatcaaataccagacgctggatgattttcatcaacagggtgcgccgagcggcgttgcgatgatagtgaccccttaccccacgcaaactatcgacgccgatccgctgattatttttacccagctgccgctgaccaaggaagaaagaaagagaattcgctcattgctggaggcgcattagcctgcttcgacagaactattgaatgatagggagaaaacgccggattacactgcgggaagcctgaatataaaaaatcggccttaaaaaaaccacgtccggggacgtggtttttcgggcaaaaaagcaggaagattatgcgtacacaggatgacgtgcgcagatatccagaactttttgcttaacgcgctcgatggtcgcttcgtcgttaatattgtccagaacgtcgcagatccagccagccagttcacgaacttcagcttctttgaagccacgacgggtcacagctggggtaccgatacgcacaccagaggttacgaacgggctcttaggatcgttaggcacgctgtttttgttcacggtgatgtttgcgcgacccagtgcagcgtcggcttctttaccggtcaggcctttgtcaaccaggtccagcaggaacaggtggttggaagtcccgccagaaaccactttgtaaccgcgctcaagcaccacttcaaccatcgctttggcgttgatagcaacctgctgctggtaagctttgaactcaggttccatcgcttctttcagcgcgacggctttacctgcgatcacgtgcatcagaggaccgccctgaccacccgggaacaccgcggagttcagttttttgtacaggtcttcgtcgccgcctttagcgaggatcaaaccaccgcgtgggccagccaaagttttgtgcgtggtggtggtcacgatgtgtgcgtgtggaaccgggttagggtaaacgcctgcggcaatcagacccgctacgtgagccatatcaacgaagaaccatgcgccgatgctgtctgcgatttcacgcattttagcccagtcaacgataccggagaacgcagagaagccgccgatgatcatttttggtttgtgcagttctgcctgacgcgccagatcttcgtaatcaatcttgccgctttcgtcgatgccgtaaggcacaacgttataaagcttaccggacaggttaaccggagaaccgtgagtcaggtggccgccgtgtgccaggttcatacccagaatggtgtcgcccggttgcagcagcgcggtgtataccgcgaagttagcctgtgagccggagtgaggttgaacgtttgcgtagtcagcaccgaacagctctttcgcgcggtcgatagccagttgctcaacgatatcaacgtattcgcagccaccgtagtagcgcttgcccggataaccttcggcgtatttgttggtcagctgtgagccttgagcctgcataacacgtgggctggtgtagttctctgaagcgatcagctcgatatgttcttcctgacgtacaacttcctgctccattgcctgccacagctcggcatcataatcggcaatgttcatttcacgctttaacatctgcatctcctgactcaacaaacttaaaaaaaacgccccagatgggttctgggcaacagtgtaaactgtttttacccccttggcatagtctcagtcgcaggtttttaagcaaacgattggcttcagctggggcaaggctttgatctgagatacacaaagcccgttcaagggacttttcttcattcttgcatgcaaatatttcagctttgtgagccagcacgcagcgtgctgcttctccttttaatttctaagggtatttacaaactacggccccggtaataacatgcatttaaaatgcatctttaagtttaacgatttttaaccgtgaaacattcaaccgaaaagtggcttaacgccattggaccgtgccctcaggagctcttcatgcttgacagtcaaactatcgctatcgtcaaatctacccttccccttcttaccgctaccggcccgaaactcaccgcacatttttatgaccgacttttcacgcatcatcccgaactaaaagacacgtttaacatgagtaaccagcgtaacggtgaccaacgccaggcgctgtttgacgccatctgcgcctatgcgaccaatattgagaatcttgccgcgctgcttcccgccgtcgagcgcatcgcacagaaacacaccagcctgaacattcagcctgaacaatatcaggcggtgggcactcatctattagcaacgctggacgagttgctgagcccgggtcaggaggtgctggatgcctggggaaaagcctacggcgtcctggcagaagtgtttattcagcgcgaatccgccctctatcagaacagcgccgatcaaaccggtggttggacaggcacccgtgcgtttcgcatcaaagagaaaaaaccacagagttcactgataaccagttttgagctggagccggtcgataatttgccggtcgccggattcaaggccggtcagtacctgtcggtttacgtgcagagtgaaaagtttgagaatcaggaaattcgccagtattcgctgacccagtccccgaacggcaaaacctatcgtattgcggtgaaacgggagtcccatggtctggtctccaactacctgcatcagcaggcgcaggtgggcgatagggtctgtctcgcgccgccgcacggcgatttctgtctcgacgtgactccgcagacccccgtcgcgcttatctcagctggcgttggccaaaccccgatgctgagcatgctcaaccagctggcggcacagcatcatcgggcaccaattcaatggatccacgccgcagaaaacggccaggtgcacgcctttgccgacgaagtgaagggtttagagaaggggttgccgctgctggaaacgcaggtctggtatcagcatcctgacgaacaagacaggccgggcgaggactatcagcataaaggcttgctcgacctttcggcgataaaagaccgtctggtgcctgccggaatgcagttctatctttgtggtcctgtcggtttcatgcagtttgccgcacgccaactgattgaaacaggcattgacgctgccaacattcactacgaatgctttggcccacataaggttttataggcgagttcagggctgaacagccggaggcgatgaaagggtctgcgagcagaaaacgggggccggtcggtgacgaccagcccgcaaagagcgcttagatagcctcttcgtcctgttcgccggtacggatacgaaccacgttcgcgatgtcgaatacgaaaatcttaccgtcaccaattttgccggtctgcgcggtggtcatgatggtttccacgcaggtgtccacgatatcgtcagccacaacgatctcgattttaactttaggcaggaaatcgaccatgtactcagcaccacggtatagctcagtgtggcctttctgacgaccaaagcctttcacttcagtcacggtcatcccggtgatacccacttcagccagtgcttcacgcacatcatccagcttgaatggtttaataattgcgtcaatctttttcatggcaggcccttttatcgttcgtttgcccatgctttagaggcagcggcaagatttaattcttagcttttaggtgctcaaggcaccagcaggcgcataaagtatcatattcccgtcacccttgggataacggcggcgtcctaattctctttgactctttaaatcggctatgactctttaaagtcattggcttcaagttcatgtcttgagagcagcttatagaactcggtgcggttgcgccccgctattctcgcagcctgcgtcacattgccgcgtgtaatctgtaacagcttacgtaaataatgcagttcaaaggtgttacgcgcctcgacgaaagtcggtagcgccgtattttcgccttccagtgcctgttcgaccaacgcctcgctaatcaccggtgcggaagtcagcgccacgcactgctcgataacgttaaccaactggcgcacgttgcccggccagctcgccgccatcaggcgcttcatcgcgtctgttgaaaagctgcgaacgaaaggcttatgacgacgcgcagcctctcgcagcagatgattcgccaacaggggaatatcttccgcacgttcattcaacgcaggcagcttgaggttgaccacgttgaggcgatagaacagatcctcacgaaactcgcccttctccatcgccttgggcagatcgcggtgggtggccgaaataatacgcacgttaacgtcgatatcgtgattgctgccgagcggacgcaccttacgttcctgcagaactcgcagcagcttgacctgtaaaggcagcggcatatcaccgatttcatcaagaaaaagcgtgccgccgtccgccgcctgaaacaatccttcacggctgctcaccgcgccggtaaacgcgcctttggcatggccaaacagctcagactccagcagttgttcgggcagcgcaccacagttgatggcaataaaagcctttttgccacgcgggctggtgcgatgaatcgcctgcgccagcacctctttaccggtgccgctctgtccattaatcaacaggctgacgtctgactgggccaccatcttggcctgctccaggagcctcagcatcacaggacttcgcgtgacaatttgctcacgccagctctcgtcactcgccggtgccgattgcgccagcgcctcatcgatagccttgtaaagcgcatctctgtcaaccggcttggtcaggaatccaaagaccccttgctgggtggccgccactgcgtcagggatagagccgtgggcagtaagaatgatcaccggcattcccggctgatgtttctgaatctcggcgaacagcgccataccgtccatctcgtccatgcgcaaatcgctcaacaccagatcgatacgttcgcgacgcagcagcttcagcgcttcctcaccgctcgacgccgtcgtgacctgaaagccttcgcttgaaaggcgcattcccagcagtttcaataagctgggatcgtcgtcgaccagcagcaggctggcgtttctccttgcggtcatgagtctctcgtcgcgttaattatttaaattgattcgttttaggcggcacgtaagtgtctttagcttgcacgttccctcctgtcacgctgcggctgccgctggtcgacgtcgatgaaggcgcgccgtcactgtcgggcaattctccctgcaactgcttgcgcgacgagagctgtcgctcgatgtcggtcaagttctccagcttacgtcgggtatcggccagactcgcctccagcagcttttgctgattgctcatttcctctattttcgcttcgttagaggtttgctgacgggcgttacgggctttttcgtcttcaaaggcgatttgcaaagattggcgctcacgccaaagctgcagcagaggacgtacggcgctcggcatctcggcgcggtaatcattgacgttattgagcaacgttctgcgctgcgcaacatcgggatcgttgcccgccgctaaaatgctctgtttaaagatattagcccatcctgatgaggggatctgcgcggcctgataatttgcctgcgccgtgctcatgcgttcggagcagtccatcgccctcagccaatacagcgagttggtgagggttgcgctgtcgtccagcgcccacagcgtttcacagggcgcgatgcggaaatcaaccactttactgtcggggataacgtcttcaatgggttgatataatccatcactctggtgacgcgcacagccgctaagcagcatcggcgtcaacagggcggatgtgaagatcaggccaagacggctaaaaaaggataaaaatcttgtctgcatgggttaattatactcagctatttttttcggcgactgacggcagctcaatgcgaaagcagacgtcggcatagtcgacatcaaccagtttcagttcaccttccatacgcctgatgcagtctttggcgatactcagccccaacccgctgcccttgacggcacctttgcgcagttggctcccctggaagaagggctcaaagatcatcgcgcgctcatcgatgggaataggtgtgccggtattggcgacatcaatcattgttcgtggcccgtcctgccagctatgaagccaaatgttaccggattcggccccatagtgcaccgcattggagtagagattatccagcacccgcaccaatagaacagactcggcccaacaggtagcagcctccgtttttatctcagtatggatcaacttgcttcgcgccgtcagactatgtgccgccgccacgctggtgaagatttcaggaagattaatctgttctttgtcggtaggcgcatcggcgagtcggcgattgtagtcgaggagttgttcgataagcgtttgtaggcggcgactgctggtattgaggatagcgaccacttcgcgctggtcgtcggtgagcgggccggcaacctcgtcacgcagcagttcggtgccttcgcgcatgctggccagcggcgtttttagctcgtgggaaatgtggcgtaaaaattcgtggcgctgcgattcaaaccaggccagacgttcgctcagccagtgaatacgcgtcgccagcgcacgaatctcctgcggtccgcgaaatctcgccacgctgcccggcgcacggccctcaccgaggcggttgatcatccgttcaacgcccttcaccggcccgataatcatacgcgtaaacagcaccaccagcatgccgctgagcagaaacaggaccagcgcctgccaaccgaagaacttgccccgttcggcaatggcgtgctgcaactgctgaccgcgtgaatagataacctcacgggtcgcctgcaccatctcggcgttggaacgtgaaaactcctcaagctggcgcgaggcgttgggttcagggctgttgttttggcacttgaaggaggagagctgggtcagcaggtcgcgtaaattctgataatagcgaacgtcgggaagaatagaggcgtgcgcgtccagcatttgcgagtattgacggcgctggctttgatagagcgtcgacagcgtatcgtcatccagcacgcagtattgccgataactacgttccatctcgagcgcaatgctggtcatcgattcactgcgccgcgcatcgacaatggtggtgcggttgatttcggctgcctggcggcttagatgattcaggctctcataggcctgataggccagaataagcaacggcaaaagcaccagcaggaaggccatcagcaccagctgtcgtaacgatccggggaataaacgccactttttcaaggaaatcatctcgctctcagtctgtttgctgatgctaaccgaggctgggtcgaaattaaaggagggagcactgcgagagtttgccctgtaggcattcgggaagaatcgcctacagggcagaagaggtggtgcctcactcaacgtgtcgttcgatgcttgataagattgccggagcaacgatatcggtctggtgaacgataggcaccttttctatggcgtcattctaatgttatgagcgcagattgcagaaagtcctgcagaggcatttataacggggtgaatgagcaaccgcgagtaatatagcaggaaacatgccaacttttaaagagaaattataacaccatgttattaaatggaattaaatttaaaatttgttaatggctgtttttttgaacctaaactttcgtttagaaatccgccagttagtctctaaaaagagacaattattggctattaaaacggattctttatttatcaatgaattacgtgtcgccattcggcgacactccgtagtctcgctgtcgccgaatgcagacagtattagtgctcgtcgtagccggcggttccaggtttaagttcggtcaactggcaggccggactgctcttgttcttatcatcctggcaatcggtagcatcatctttcacaaaaatgtgatcgaggatagcgcgcattgtcggacctgctaccacaccgtcgccgccgccgttttcaagaatcagtgccaccgccaccgtcgggtgatcgaacggcgcaaaggcggtatagaagatgtggtcacgcaggcgtatcggcgtcatcttggcgttgtagttctggttctcacgcaggctaaatacctgtgatgtgcctgatttcgcagctattttataaggcgcagtgtggaacagcttgtagccggtaccgtttggcgcattggccataccaaacattgcattcttaacgatggtccagtaaggcgatttcgggtccgcaatctgcgacgttggcggtgccttataaggggtaatcactttacccaactgcatagaatctagcaggtgcggagtcatgattttaccattgttaataaggatagtcagcgctttcaccatttggatgggtgttgcaatccaatagccctgcccgattccgaccgagacggtatcaccctggtaccactctttcttgtgaaccttcatcttccattcacggctcggcaggttgccgtaatactgctcatcgaggtcaattcccgaagatttaccgtagccaaacttgctcagccattcatggatacggtcaatccccatctcgtaggccacctggtagaagaaggtgtccgctgattcttcaatcgccttggtcacgttgaggtagccgtggcccgttttcatccagtcgcggtagtggcgctcggtccccggcagcgtccaggtcggcgcaccaaagaacgtggtctgcggcgtgataaccccggcaaacagcgcagagatagacatataaggttttacggtcgaagccggcggatacaggccctgcgtgacgcggttaatcagcggcagatccgggttcttcaacagtgcgctgtaggccttgcccgagatcccgttaacgaacgggttagggtcatagcttgggctggagaccatggcacgcaccgaaccgtcgcgcgggtcaaccaccaccacggcagcacgctggcctttcagcagttgctcgatatattgctgtaggccgagatccagcgtcagcttaatgttttgaccggcctgcggcggcgtttcggtcaacaaacgcacgacgtgaccgtggttatccacctcaacttcctgataaccggtgcggccgtgcagctctttttcgtagtatttttcgatgccttgcttgccgatatcgtggtcggcggcgtagttttctgcctctccggccgcggaaagttctttgtcatcgcggtcgtttattttcgacacatagccaacgacgtgcgccagctcggcaccgtaagggtatctacgctgctgatagctggttatcgataccccgggaatctaaactggtttaccgagaaacgcgccacttcctcatcggtcagcgccagtttcagcggaatttctgcaaattttctaccgtgatacatcgcatctttgaagttatccatgtcgtccgaggtcaggtcaacgatcggcgtcaacgcctgcagcgttgccttcagatccggcactttaccggggatcacctggatttcgtagagggtaatattttgcgccagcaccacgccattgcggtccagaatcaacccacggctaggggcgatcggcagcatcttgatatcgttctggtttgagcgggtttggtagaaagagtgcatccccacctgaaggtggtagagattgaaggtcagcacgccgaacagcatgacaacgacgacaaatgcaataacggcacgacggataaagagccgagactcagccgtatggtcgcggatttcttcgttcaatagggccattaccggggattacctttcttgtcagacgtcagtactaatacgaaaaatgcggagttgcagaaagtgcgaaagaatagcgcttatcggtcagtcggaccataagaactgtgctaatcaagcaagagtaatgtttctatttatgaatggttaagcaaaagacaatgttagaagggacgatgccagagactacgggggataacagcctcaatccatggattatgggttgaggcgcgcgggatgttacttgtctatttttacacagtcggcgtagatataaccttccgtttcattagcaataacgaaactgttctgcacgtgaatatacatcagattgtttgccgttcccgccttcatcggctgattgttctggccgataatatcggtgagttcggggctggtaatggtttttatgccatcgggcgaaacggtgaaagtattccccgcatccgtcacgtgtgcatttttattcagcacttcggctgagtcatcgccgtccgggcgctgaatgctgtgggtcaaaacgcatttatagtttgtgtctgcaaacgctgtatatgaagttaaagtcagtaataccgcaatgaaagcgacgagcctggccattgaaaaatcccaactaagaaaagtgagccacatcctatcacttggcaatattatggaaagtaggtggcaaagaaatagtcataaatagtccactcctcacccattaaaaagcccgcataatccggcgcgggcttgaataaacaattaatgcaaaagaaaactcacggcagagaaatgtgcccaacctgataataatgttcatcttgctgaatgttttcaggcgcatttttccacagcgcgaaacgaataagctgccaatgttgggtgtcccaggccaccaccctcgccagtgcaccttctaaaggcggtgaaatctgccattcaggcaggatgctgtagggttcgatggttttgattacacgtgagacaaatcgtgcctcgccaatttccgccgagagcgctgtcgctaatactggagttacccgcaccgttggccagccaaaggcctccgtcaacgctttgaatccgtcgctgagcagaaaacggtgcatgctttctgcgtcttgccacagataaaaaggcgcatagagattctcacgacctgcggtttgtggtgccgatcggcgggcgtaaagataagccttgaacagcagtcctggaaatccgtcaagccgatgaccgttttcagcaattcggcgttcaataatcgccatgtcgtaatcggcgggaaaggtgaagctatattgcatcgccagcatgataaaacctcactattttggaatatccgccacctggaacacctttccgccaccaaatgaccaatcctctggctcggtataagtgacaactatcatcacgtcctgagggttgatgcctatcgatttgtggagacgttcaaccaacgcggcgtagagcgcctgtttctgttcaatgttacgcggtcttcccgccgtaatttgaaacaccagcaggtcctcgctgcgcccagactcgtcgccgctgagataatgtttgtcaaacacgcgatcggtttcaccatagcggtcaaacagttgaaaacagtcatttgccggcactgagaaacagctttcgagcgactgctgtaacgcttcggagattttgctttgccacgcgttgaagcggcgttctggaatggcaatacgagtaatgggcatgatggcctccgattattccaacgttaattgagcaaaaacggccagtgccgaggctgcagttggccatccagagtaaaaggctagatgggtgattaactcggtgatttcgctgccagataggccatttttctcggcgagttgcaggtgataaggcagctgttcagtgcgggacagcgccactaatgcactcaccgtgatcaaacttctgtcgcgcggcgacagctcgctgcgctgccaaatatcaccaaacaatacctcttcgctcagtgccgctaacttgggtgcgacctgggccagtgtttcgcgggttatcgggaacttgctcattttatcttcctcggcgtgggtgtaatggagaagataacgggctatgatgatttataaaatcagatataacagcagctatagtccctaaaaacaggatgatttatcgtggctaaaagacccctgacttttgattccgaggctttacgcacctttgtgaccggcattgagctgggaagttttgtgcttgcggccgaacggttgggccgctcgacgtcggccatcagcgcgcagcttaaaaagctcgagcatcaggcaggaacggcgctggttcagaaagcggggcgtcatctggtactcaccgaaaaaggcgaacttatgctgggttacgcgcgcaggttgcttagtctgaacgatgaagcctatgcgctgctgatggccagtgaggttggcggggaggtgcgtttaggcctacaggaggatttcggcgaggccctattgcctgcaattctgggccagttctcccgctcgcatcccaacgtgcagatttcagccagcgtcacccgcaatgagcccctgctttctgctattcgccagaacgagcttgatctggcgctgagttggcagggaaatgacaccacgccgtttagtcaatcgctgggtaaattaccgctaagctggatagccgccgaaggatttgatttaacgccctatctgacccaagacctccccttaccgctgctggtttttgaacccttctgcatcatgcgcaccgccgcaactgccgcgctcgacagagcaggaatcccatggcgtatcgccttcaccagcagaagcctgagcggtatctgggccgccgcctcggccggattgggcgtcaccctgcgcacggagatggggatgccttctaccctcaaggttattcgctccccctgttaccccgggttggcgatattggcgtgacactgcaccgcgctgaaaaccggctgcccgaggcagcacactcgctttatgagacaatttctgactatttcccgcaacagatacaggttttggccaaggcgtaggccaatgaaagtcggagctaaaccagcacacaaaaaagaaaatagcacccgcactgagttaggttttaaaaaactaactcaacgcggctttattaactaaaaactatttagtgaaaattaatttaattcctaataatgccatcacgccaccgctaattcggctaatcgattttttatagcgtaaatagacgcgctgcgggcgggcagaagacaacacaaaggcgacaaaggtgtaccaaagcgtatcgataaatagacccagtgcgggcaaaacccaatagaaataacctggaatatcgcgcggcatcagcgcagcgaaaatacctgccagcaccagtacagttttagggttacatagctgcgtaaccagccctacgctgaaactcttgccgaaacctattttctcagcctgcccttctggcccaaaaatcaacggctggttcgcaccgcggaaaatcttgaccgccatagagaagagataaagaccccgaggattttcaaagtgacgaaaagccacggcacggtgaccaacagctggtgcaaccccgaaaaggcgatcaagaccaaaattgcacagccaacccccataccaagcgcggtcgccagaccgtctcgacgagaggacgcaattgaggttttcgcaacaaagataaagctcggtccggggctcatcgccccaacggctaacgcaaccgaaattgaaaagagggaaagcagttcagcgtgcatctaatacctccatgaatattcgaacaaaattaaggcaattaatgtcctacttaatgtgtgaataatcaatgggggcttaagtggtaatggcttttttgatttcaaatttttagggcgagcgttgagattctcaggctagccacacgttgcatcaaattctcactctaaaatgcagcccctgcacttatcgtactcgttccctgaacctgagtttgcccggagtcactctgcgccgtgcagccattgagaagcataagcaccagtgcaaccgcaaaggccctgtaaaaactacgtatcaatgaagtcatctgaaggtatctcttaacgccgtattgttctgtttcgacccacaataacggcgttagttgcagattttaccctttcttgtcattgttcactgaatattaacgtcagccccaatccttgcccgacctgcaccacaagctgattgtttcgctcagtgaaatggatgtcaccgcgctgcaaactctgccgggcagcatcgagcgaatgcgtcgcaaaggtcagcgcaatcatctttgattcaaaagcctgttcaaagggtgcaatcccccattccgcctcagctttttgcggtgtcacaaaacgaactcgcgctcgccccgccgagagactcaactcctggtcatcaacctcgtgcagttgttcgtcgccaaacacgtcgacatagacctgcgccgcctgtcggatgtcggccgctgcaatcacaaactcggtaatgtctgacaccgcattcggatgggactgccactcaccgcgccaaaccaattcgggcgttacgtgctgacagaagaaacttctgccgtgcgcaatacgcgacgcatcaatcgataccgtctgaaatcgtgcgttgggttcagtcccatcattaagttttaccggtcggtagaaggcctttggctctgcatcatcaacctgccgctgtgtaagatgctggtaaactgcgtcggcattctgcgttttccacacgagtccgttcaaccctaacggcgcctgccaaagctctttacgcagcaaagtgctgcgatcctcaaagcccagcagctccaggtaattgtcattaaagatggccagatgattgctcgaccctaaagagtgatgtccacgagacgttagactgaatcccaacctgcgaaacagcagctctgatgaattcagaccctcggcaacgttgataacaacatgatcaagatggggaacaatagcggtcataagactctcttcattaattagttataagcaataacttaaagaataaagagtgatggctttttcaagaacgaagttttctgcaaaactaatccctgttttgagataaacaaacgatcggggcccgaaaacagcgttacgcgtcatcctgctgaaatgctaaatgaatcaagcgtgatttagatcaacaaaaacccagagctgacgcggcctgcaaggccattctcaggggaaaaccaggcttttctcaggctaaatcaggtcattcataccgatatttatgcacttcattcctcctctgaggcatttcatgcctgaaacgattcaactcaccgattaggacttatcatagcgccaatttaaacgcatcagtttcgctcgggagagcccactatgagtgataagtcaggccttacacgtaccggaacgcagtccaatgttgccgtggccaatctcaaccgtactcgctggatgacgctgataggcaccatcatcaccatgttcgcgctaggctcggtttatacatggagcctgttcaacggccagctttctgccaagctcgacgaacccatcagccgcgtcgccttctcttttggactcctgagcctcggcctggcggtcgcctcttccgttgccggaaaactgcaggagcgctacggcgtcaaaaaagtcaccctcgccgcgggagtattaatggcggtcggttttttcctgaccgcacactccaatagcctggccatgctttacctcagcgcaggcgtgctggtcggtctggccgacggcgcaggctacctgatgtcgttgtccaactgcgtcaaatggttcccagaacgtaaaggcgtggtatccgcctgcgctatcggggcttatggcctgggcagccttggtttcaaatttatctgcggctatctgctaagcgttaactcactcgagcacacctttattatctggggctgctggcgatgaccatgatcgttatcgggggctgatgatgacggatgcgccacgtcaggaagcgaaagtcgttaacaaccatcaggaacagccgcgagacttcagtcttgccgaagcaatacgtgtgcctcagtactggatgctggcactcatgttcctgaccgcctgcatgagtggcctgtacgttattggcgtggcaaaagatatcggccagggcatggtgcacctcagcgcaatgactgccgccaacgcggtaacggtaatcgctatcgccaatctcagcggtcgtctgattctgggcgtgctgtcagataaaatggcccgtattcgcgtgatttctctagcacaggttatttcactggtcggcatgagtattctgctcttcactcatatgaatgaagccaccttcttcgcctcggtcgcctgcgtcgcctttagctttggcggtactattaccgtgtatccttcactggtaagcgacttctttggcctaaacaatctgaccaaaaactatggcctgctttatctaggatttggtatcggtagcgtgctgggttcacttatcgcctcactgttcggcggatttgtagtgaccttcagcttgattactgtgctattaattatctcccttgcgatttctgccacgattcgcctaccgaacaaagaacttcaggagcagaatacgctgcaacatgtgtagcccgttttctgaccttttcttatgacaaacgggagccatggctcccgtttttctttgttttcggacacccaaaatgacccgctgtaaaattttgaccactatcctgttgctggcaggcaccgcgttttacgcacaggccgcagaagttcctttaagtgccccgctcagccttgcgtggaacataatgcgtttaatcagagcacagaccatcaagatatggccaatccgtcgggccaaaccacgcatttgtcgtctgcccactgcctgactagcatccaaagcagtaacaacaataaactgttcggcaataacgaactgttcaaataacaccccgctgctatctcttcctgaatctctaattaagatcgattcaggatatttcacggcttgtctccttgggcaataatcgccggtaatttcctttaatacaatcacttcagaaattagttattcaattattgttgccagaacggtgtttctcaatttaagggaaataaggtttatgctactctgcattcgaatatttttagcatcctgtatggcaattgaaaatgaataaaacgttaattaatctttatatcaaatcaaacccagtacgattctcgtacaagtatgaaattacccctatattaatccataggtgatccaaatcacggacattcatactcctcatgagtatcatcccgccatccaaaatctgcctcattgtagtgacggcagcttttaatattgtgactcagtctctcattttgagatgacgtaattttgttcaccagaggttatatgagcaattctcaagtagaagtacttgcccaggaaggcgtagaaaacaccggcgcttggcgtaaaactgacaccatgtggatgttggggttgtacgggacggcaatcggcgctggcgtgcttttcctgccaatcaacgccggaattggtggccttattccactgattatcatggttattctggcttttccaatgaccttttatgcccatcgcggcctcacccgatttgttttatcaggtaagaatgctgggcaggatattacggaagttgtggaagagcatttcggaattaccgcgggcaagtttattaccttgctctacttctttgctattttcccaatattattagtttacagcgtcgcaataactaatactgttgaaagtttcatcacccatcaaatgcatatgaatgctccgccccgtgcgttattagcattgatattaattgttgcattgatggctctggttcactttggcgagcatcttattgttaaggcaatgagcattcttgtttatccctttgttattgttttaatggcgctgtcgctttatctcattccgcactggaatacctctattttcacccacgtttcatccaccacaggcgatgtaggtcgcggcatgttgatgacgctgtggctggttattccggtgatggttttctcatttaaccattcgccgattatctcctctttcgccgtggcaaaacgcaaggaatatggcgacgaagcagagaaaaaatgctctaaaatcctcactttcagtacgctgatgatggttgtcacggtgatgttctttgtgttcagctgcgtatttagcctctctcctgctgacctgatggaagccaaaaaacagaacatctcaattctttcctacctcgccaaccattttcagacaccgcttatcgcctatattgccccggtcatcgcctttatcgctatcacgaagtcgttcctcggccactacctgggcgcgcgcgaaggctttaacggcatcgtgaccaaatcactgcgcagccgcggcaagacaatcagcagcgcgaaaatgaatcgcattacggcagtattcatgctgctttcaacctgggcaatctccacgttgaacccaagtattctgggcctgattgaaacactgggcggcccaatcatcgcgatgctgctgttccttatgccgatgtatgcgattcgcaaagtcccggcgatgagaaagtattcaggtcatatcagcaacggctttatcgtcataatgggcctgatcgcaatgtctgcgattgtttatagcctgttcggttaatgcagcaagcccgaggggaccacaatgattagcgttttcgacatttttaaaattggtatcggcccgtcaagctcgcataccgtcggcccaatgaaagcgggtaaggcttttatggatgagctcgccgcagcaggtttgctggcaagcactacgcgcctgcaggtggatgtctatggctctctgtcactgacggggaaaggacaccataccgatatcgccatcattatgggtctcgcgggcaatctccccgattctgttgatatcgattcaatcgcaccgtttattgcccaggttcagcttagtggtcgcctgcctctgaccgctttcggtaaagaggtcgactttgtgttgccggacagcctgaagtttcacgacaacaatctgccgcgccatgaaaatggcatgaagataagcgcctacgctcaggatacgttgctacacagccagacctattactctatcggcggcggatttattgtcaccgatgccgagttcggcgagagtgaaatgaatcccgtgacggtgccctatccgtttaattcagcggcagatttacagaaacactgcgacgagtcaggtctttcactctcggccgtcatgatgcagaacgagctggcgctaaacgacaaatcgtcgattgaggcacactttgccgccatctggcaggttatgaaagaaggcatcgagcgaggaatccacaccgaaggcatgctgccgggtccgatgaaagtcagacgacgcgctgcggcgctgcgtaatattctggtgacacagggtaaaaacagcatcgaccccatgggcgttgtcgactggataaacatgtacgcgatggcggttaatgaagaaaatgcggcgggaggccgggtcgtgactgcgccgaccaatggtgcatgcgggataattcctgccgtattgacctactacgaccagtttattcgcccactcagcccggacgccagcgggcgcttcttcctcgctgccggtgcggtgggcgcattattcaagatgaatgcctcgatttccggcgccgaagtaggctgtcagggagaagtcggtgtcgcatgctcgatggcagcggcaggcctcacagaattgctgggcggtaacacggttcaggtatttatcgctgccgaaatcgcgatggaacatcacctcgggctcacctgcgatccggtcgccgggcaagtccaggttccttgcatcgagcgcaatgctatttcgtcggtcaaggccgttaacgcatcaagaatggcgttgcgtcgcacctgtaagccacaggtttgcctcgataaagtcattgaaaccatgtacgaaaccggtaaagacatgaacgccaaataccgtgaaacctcgcgcggcggtctggctattaaagtcgtgccctgtcattaactgacactttccccttatccaaaggcttacatgaaaagtaagccttttttctgcctaaaatgccaatactgcgctttacacatcgattcttaaccttaccggacgatgacaaaaccatacattaggtttggtatcttaaattcatcgagagaaagtgatgtccctgtgtgaatgtgtgaatgtgtgaaccagtaatgtagtaggcagttgtgatacccctgtaagaaccctgttgtgtagaaaccctgtagtacccctgttatttgcccgccgatgtgcgggcttttttttacccatttttcggcaaagattccccaatctttcagaatgaaagacaacaaaaaggcctgtcataatgacaggcctttttgattaatcccctttcccggcgcttatctccggcactcgtttaaaacggcgttagctctgcaaggggatgagtctgataatactcctctggcagtttggtttttaacaataattgctctgctaatagttactctctttaccacttgtgttttctggaaattttttgctctcgacacagcactatcgcaggtagagagtcctctcccatctgtagtccgtaagtactagccgcagagtggataaaacttcaccataatcatcggcaatatggtcgataacaaactgacgcagcgcggttggcattctttcggcgttatagcgcaacagcgtgctgtgccaaaaaacctgcggtatggcgcctttatggcaggctaagacttcttcgcgcacgctcgacccgagcactctggccgtaatatcctgcctgcgccagtagctgtgctcgtcgggaaaaccggccagcaaaatttgatctgcaagcgccaataacctcagcccggagatatgcactggctggtcggcgcagcattgttcgaaaatagtcagcaggtcggggctgatatcctgggccttttccggtccgtatttctgcgtcccaatagccagataggtaaagtgtatcgcctccgatgacatcacctcggcgagcgaatcgccttcagttagctgcctgagctgagccagcagtgcgagaattttagagttcagcggaggtttaatggcgatggtttgacacagcagcgtaggatgaaaaaatggcgtggcacgccgcacacctatatccgcagacttttgccacagcgcctcggttctggactgtgcattatcgtaagcctgctgaatttcctgcctccagcccatgaaaacctctcgtccacgttaactgtttagtaatttcctgacggcaagtccggccgccaagaccgggttcaccaccggtattgaggtataaggggccaccagcgcggcaacgtcggtagtggccatgccggtgcaggccaaagcaaccaccttagcgccgtctttttcacaggccagcaccgcctcgataatcgccgctttgcccgcctcgctatgaatatcgtgggtgcagtttacgcccttcggctgtcgataagtgcgcagtctgtcgtgtaaaacctcataaaatattgccggtgctcgcggttcgatcccaatggcccccacgctgtggctgaaggtaagcgcctgctcacaacaggactgcccggcaccgacaacgggaatgctgagcaactgacgcagctgttttaccgccggatccgaggcacagcttatcaaaagaatatcgtaggatttttgcagctcaaggccgagagccagaagttttggcacggcgagcgccagcgtttgctcatcatggataccgtcatactgctccggcagacagtaagttgtcatcgccaattctggatgatttgcaatgataatattctgatgaatatccaggaaatccttatcctgcgaggtcactacgcgtattaatgcaacctttgcctgcgcttgttgttttagtaattctgcgttcatgcattttcccccggaatgaagtcggctaatcagccgcaccctcagcggcctgctggcgatactgttttggtgagcaggacataatacgcttaaacgcgtgactaaacgcactgtctgaatcataacccaaagactgaccgatggaagattaacgggcaggaattatgatagcgccactgacccgcgacgcacgtggctatgagtctcagttttccactaaccatctggggcattttcagcttacggcgcggctgtttccggcgttaagacaggcaaacggggcccgcgtggtctgcgtctcttccgccggtcatcgcctgtcagacattcacttcgaagatcctaactattatcaccgacctcatgaaaaatggccggcatacgggcagtccaaaacggctaacgttctgtttgcgttagcgttagacacgttgggtaaaaacgttggcgtacgcgctttctccctgcatcccggggcaatatttaccccactactgcgctttatggcccatgaagactatggtgttgtgggtgccctcaacgagcagggtgaaataaaaaccaccgcagaagctggattcaagacgccggagcaaggcgcggccaccgccgtctggtgtgcaaccagcccgcagttggagggtcgaggtggggtgtactgcgaagactgcgacatcaccacactaaagattgaaaaagacgcccttcatggcgtgatgccgtgggcggtcgatgctgagtctgcgcacaagctctggaagttaagcgaacaactcaccggcgtcacctttaaccccgatgagtcgtagggaggcttagcgcttcagcgctgcgccgttgctttgaatcacttctttataccaatagaagcttttcttgcggcggcgctccagcgtgccattgccctggtcatctctgtcgacataaatgaagccatagcgtttagagaactccgcctttgaggcgctcaccagatcgataggtccccaactggtatagcctaacacctcgaccccgtcctgaatcgcctcaccaatctgcaccagatgatcgttcagataggaaatacggtagtcgtcgatgatttcgccattagcctgcggcttatcataagcgcccaatccattctcaacgataaacagaggtatctgataacggtcgtaaagctcattcatcagaattcgaataccctgtgggtcaatctgccaaccccagtcggaacttgccagatgcgggttcggcaccatagaaagaatattgccacgcgctttctgattaagctcttcgtcggtggttacgcagcctgtcatgtaatagctgaacgaaataaaatcgatggtcgatttcagcgcctgtcggtcttcgttggtgatattgatttcaataccgcgatcggcgaagaaacgtttcatataagccgggtagctaccgcgaacctgtacgtcgccgaagaacagccattcgcgattttgctgcaaagtctccatcacgtcttccggcttactgctcagcggatacagcaatcccccaacagcatgttgccgattttagcgtccgggattatctcgtgacaggctttaaccgccttggcgctcgccaccaactgatggtgaatggcctgataaatatcctgcttcgagctgttttccggcaaacccacgccggtcagcggagcatgaagtgacatattgatctcattaaaggtcagccaatatttcactttatgctgatagcgctggaaaacggtgcgcgcatagcgctcgaaaaactcgatagttttacggttgccccagccaccgtgcttctgcaccaggccataaggcatttcatagtgagagagcgtgaccagtggcgcaatattgtatttcgccatctcgtcgaacaggcggtcataaaatgccaaaccggcctcgttaggttcaagctcatcgccctgtggaaaaatacgcgtccaggcgattgaggtccgcaaacagctaaatcccatttctgcaaacagcttaatatcttccggataacgatgataaaagtcgatggccacgtctttgatgccgctgtcaccggccacacgctcaaccacaccgccgaagataccttttggctgcacgtcagaggtcgacagccctttgccatcggtcagataggcgccttccacttggttggccgctaccgccccgccccataagaaattttttggaaattgttggctcatcgtctttctcctgtgttaacgcaccaaggtcaataaagggtattttcttgaatgtcctgcccgtcattgataatgacgtcggcaaagtcgtcgctattggtaatcagaatcggcgtatccaggctgtagccctcgcggcgaatagcctcaccgtcgaattcgagcagcagttgtccgcgaataacctcatcgccttcactgacgtgcggggtaaaatattttccgtcgagtttcacggtgtctattccgacgtggattaggatttcggcgccttgcggcgactcaagcccaatagcatggaaagttttaaacaatgaggcgaccttgccgtctatcggcgataccacacgccctaccgtcggggtaatgaacgcccctttgcccagcaggccaccggcaaaaatcgggtcactgatgttttccagcgggtgcagctggccgctcatcggactatagattttttcaagcgccgcttcgccatgggtcgttgaggtcaatggtgcaggctccacctcctgcacctggacctgaggtttcgcggcgggcttcatgccgaagaaataagtcagcagcgttgcgagggtcagcgagatcagcaggccaatgattgccgcgaccaccgtgaagtcgaaaccggtgggaggaataagctgggccagcgtgaagatgcttgcaaaaccaaacgagtaaaccgccgtctggaaatagccgatgatcccggctccaatcgccccgccgacgcaaccaaaaataaatgcacgacggtttggcaacgtaatgccatagactgcaggctcggtgatcccgcaaattcccgccgccattgccgaagccgcattgcctttcaactgggcgtctttggtgcgtagaaaaatgcccaacgttgcgccaacctgcccgaaaatagccggaaccagcagagggatgagcgtgtcgtgcccaacaacgctgaggttattgaccatgataggcacgatgccccaatgaatgccgaacatcacacaaacctgccacaggccgcccatcaacatgccggcaatgaccgagttaaagccgtaaatcagctcgtagccttgcgcaagcatattgctcagccaggttgcggcgggccgataatcaggaaggtcagcggcaccacaatcgcgatacacaacagcggcgtgacaaagtttctcaccgcactgggcaagcgaggatgtacgccgcgctcaattttgcaagagagccagcaggccaacaccaccggaataacggaagaaccgtagttgatcatcacaacaggtatgccgaagaaatgatgcggctgcgcgcccggcagctgtgaagcggtaaaggcggcgagcatcagcggatgggttaaggcaccgccgatggccatcccgacaaacgggttaccctggaattttttacaggcagaatagccaaggaagataggcagaaaatgaaacatcgcgtcgctggcggcgaacagaatctgataggtgccgctttgcggagtcgcccatccggcagccagggagatagaaagcagccctttaagcaccccaccggcaatcaagataccgataaatggcgtaaaaatggcagaaataatatcgataagccgagccaacagcccttctttagcggtgctttcgttgttcacaggctgtgaaggtgaagcgtcgagctgctctgctattggcttataaacctgatcgacatcgttgccaatgaccacctgatactggccgccgctttccacaaccatgatgacgccgggcgttttttttaaggcttctgtgtgcgctttgctactgtcacgcagtttgaatctcaagcgcgtagcgcagtgaaccaggctgaccacgttccccgttccgccgacgccgcctaacacctcggaagctaattctttatatttcatcgtgtttaccttcttccctgtacagatatgaggcttgataactcgcgttttccggaattcaggccaaaaaaaaacctaaaccgatatcctgttagcggcacatgaatgccgtaacaaaaaatcggtttaggttttgcctgctttccagtaacaatcctaactttcggtaaacagcatgccctgagagaaagctttactcaagcacgcgtctcaccgtcgtttggattttgtgagcgatctctcgaatcactccccttcaaccgctggctgattgagcgtttctttacgcaccctttcgatgtgaatcgtcagaaacattttttcttctttagtcagcgcgtaaagataatttttctgaatatgacgctccacggtcagcacgcactggtaggcttgaggatagagatttttgacctcatcgtgcagcgactcgtcttcattacggaccagtttgctactgagcattcgctgggcgaaaaattttagatgggtaataaaacgatgataactcaggctatcttcccggtaatcgaggcgcagctggtatttcacgatgtgcataatttgctgaataatccgtgtgacctgtaccacctcagacatctcgccctgtagctgccccttcaccaaatgctgtgcgatatagcccgcttcgtcctcaggtaagcgcacgccgaggcgctgctcgatgatgtctaacgcttcaaggctaacggcaaattcacggtggtaaacccgtttgatatcccaaagcagtgcattgggcaatgaaatcccttgcctgaaacgttcaagtgcaaaatggcagtgatcggtcagggcaatatacagattattaccaagctgctgcccaagacgcgactgcgcaagatcgatgattttttcggtcgtggtcagcacctccagcggaatttcggccagcagctcgctgagtcgagcattaagcgcattgccctgtagcgagaaaatcttctcgacctgcgacatatcgaggcgttcgccgactcttttttggaaagccaatcctttgcccatcatgacctgttcatgcagagaatcatcgacggcaatgaccgcgttattgtttagaatttttataattttcatcatgttccctgaatgaaaaaggataacgccagtgcgtgtccttcgctgataacggtgaaagagtccgtaaaaacagcggataacaagcattattatttgagtaaacggcaggaaaaagcgaggactcgtttcttattgagtaaaattggggtagggtttgcgggttttaaacaggaggctgaaatgagcgaagaaaatttatcccaaagaatcgatcaactggaacgcatcaaccgtgagctgttggttcaaatatctgccatgcgcatgctgtttggcagcgtcggcaacaccatgaatgcgcagtttgaaaatagcttcacgaccggggtaaaaaccttcgtggaacgtgagaaagaagcgttgaacgccagcgagattgatgaggcgtcgaagaaattccgcactgacgtgcttaactgcgtgtcttctctgctgccaaccgttatttaagtatcaacaccctgcatttgttcattaatgcagggtggattttatcaacaaaataacgcgttaacctcgagtcaggcactgacgtctgcgctcatccacgcgctgggcaaaccaggcggtggtcagatttcgggttattttcgggctgtttagctcaatccccggcagcatttctcgcggcacctttttacccgccgttttatcggcgagcgcaaacactaacttccaggtcggcgtcttctcaaaatcgattgactcacccagcctgagatcgcgagaaatatccgaattactcagactcagccttttactcagcctgcgcacggccatttcggttttccccgtcgtatcgctgtagctcaccacgtcgccatcaagcgccaactttaccccggataaacgactcaccgcctgctgaaaggctgcatttcggctggcataaaaacccgcgttatagtcggcgaagcggtaaatcggctcactgtagtgcgtcggataaccgagcaaatgcgcgataccgaaatacatgcccctctgcggctaaatacttcgcgacgaatagtgccgtcaatgggatacgggtagccactcgccttagattcggcaaaggcgacactgacctgcatcgggccgccggtatgcaccggattaaggttgccaaacagcttctgccccataggcaccatgccgataaagtcgtcgaaaatcgcgcttagctctttctcgctgcgaacgttgtccaggcgatcgctataggacttgccgttgggagagttgatttttagcgcggtatgaaccaagaatgcaggaatatgaacctcggccgcccgtctatctatctctttccaggcgattttccccaaacctggcaccggcgcattggcgttaaagttggattcttgttcagtgaccgccaatacggcgcagatattttccgtcgtcgggtcgattttttgcgtgataaacgcggtgctgatgtccttcgcccatccctgtttatcggcaacgttggccggcatcagtgacataatatccgctcgtacctgttcaggtcgctgggtgctgacggtatttttttcggaactgcatcctgcgagcagtgaaagaagcaaagcgccaaccaccggctgcgtgcgcagtttcagcagaatgcgcgcacgaggcaacagtgccacttggcgagcgttgttggtaaataaaacgttattgagcgtcatgttttccctgaataatcaaaccagtcacctggtccgattattcacagaatgaacgacaacaacaaagcttttatttaccaaggttggcaggaaaattacgccgccttctcgacaaaatagttcagaacctcacagcctttccccacggacggggttgcaatcacccttttgctggcgatatcaataatactcaccgtaccgtcagcttcgttagcgatgagaaggcgcttattatccggactgaagcaaccgtccatcggcttattaccgacgttaaagcaggctacttcatttaggccgccatcaaacagggtcgcgaccggctcttgatcgccaatcacaatgagatattcaccatcttgactgaaacggacaatttgcgcccctttcttatgcccacgcagtggaacatatcttttaattttatgcgtttggctatcaataataactagttcaggtttatcggcattgctggtcacaataaatggcgcatgcggtgcagcggaaataccgttcacacctcccggcatgtcaatattatcgatgactttcccattagtattttttaattctacgaccgtgacgctggcatcttcctcgttgtctgtgaacaacttatttccttccggtgttacgctcagacgatgcgtataggttgaaggcacagaaatttggcggataactttatcggttttagggtcgatgacggctatcgtggcgctattttcacagcagagatagacgttgccatcggcaccgagacgcgcggtgtgcggtgattcaagcgggctaagctcaatgaatccgctgagttcatggttgataagactaataacggcaacctgatgctgaggatgtggattatcgccatgaattccgtcgccaaatatcggcacataggctttatcgtgttcaggaataatcaacaattcatggggattgcgtgggaatccggttaatactttctctacttccaatgtttctggatgcaaaaataatacgcgaccaccctgcttatctaccgcaataataccgtaccggttgttattttctgataaagacatgtcagctccgtgattttttcaataagaaatacgggtaatagccctatgctgttaactgtactcataaggatagtcgcttatttccactatcgcgatagcgtattaaaccgagctcaccacaatcagaccaatccgttccaataactgcgcctgctgccatatatcaatcttcactccgtcaaggctaacgcggcggatatttaaatcccccagctctgaacgcgttaagtcgcaaaaggtgaaatctgccgtcgtccagtctatttgatgaaactctccgccagacaagtctgaccccctaaaactggccccagtatattggcaccggtccaacggttttcccataattcgcatttttcgagcacgactttctgaaagttggcatagctaaaattattcttggtgagataggctcggcaaaaataagagcggctggtgatcatattcatgaaactggcaccgcgaaagtcagcccctgacgctttacactcacggatttcgcagccaatagcctctacgtgtttaaaatcggccatggtcaaatcacagcgcacgaagctgctttctcgcaggttggcacgctgaaaacagcagccaacctgctgactgtcatcataaaaatcacagtcaatgaactcgctttctgacaagtcagcgccgctaaaatcacagcggataaagcggcagttttgcaatttctcatcgcaaaaagtggcgtcatcgaaacgcatatcgctgtaggttttattttggacggtcattttccctctgggtatttttcggaaagggttgaggcattttcagcgggaaaaacagcgtaaatcgcgtctcgcggttttcactggtgacgtcccaacgcccctgatgcaggttcatgatgctgcgtacaatagacaaccccagtccgcttgattgggatcgggtattacgcgacacgtcggcgcgataaaatctgtcaaagagtcgcgccagatgctgcgactcgatagtcgggccgagattagtcacgctgatgcaggtacctttaggcatttgctcggccagcagcaagatttcagaaccaggatcggcataacgaatcgcattggccaacaggtttgccagcgcgcggcgcagcaggttggcatccgcccagacgctgccgtcgctgcgtaatttaagcctcacatgacgttcatccgcgggaccttcaaagtattctcccacccgctcaaactcgtcggcaagcgtaagttgggcacgctcaatggcgtggtccgcgtgctcggcgcgcgccaaaaagagcatgttatcggtcattttagacaaccgcagcagctcctcaaaattcgaacccaacagtttctcatagtactcgactccgcgacgctggcttagcgcgacctccgtttgcccaagcagattgccaatcggcgtgcggagatcgtgcgccatatccgccgaaacctgactcaactgggtaaagcttatctccagcctgtcgagcatttcattaaatgcctcgataagcgtcgacagctctcgcggtgcctgagtgctgtcaattcgcaccgacaaattacgaatgccaatttcggcggtttgcccggcaagacgccgcagtgggctaagcccgcgccgggcaatgagataagccaatagcgcagttaatgccccgccccagcgcaagcaggaaaatctgttcgcgatagacctctaaaatccgcgtacgttcggtcatcagtcggccgctgataatctcaagatcatgtggcgaatccgaggtttgtgccgcggcagagaccgagataaatggcgtgtcgtcgcgcgaggcactgtgctgaactgccgcaagcgtgagatctttattggcaggaacaggggaatatcaggcaccggtgaatggccgggattgacttcaataagcggggttggccgggaaaacgcagcaccagcagcgattcctggttgcccagcatgttggcaaacaactgaggtttctcgtggatcagattgatcacgtcttcgtcacgaagcagagtacggatctgttctacgcgggtcagcaacgcgccgtcatcgcggagactgatctgtttttccagcgtgcgatatagcgtaaaaccgacggcggcgatcactataaatgaaagtaacgcaaaaatgatcgacagacgcgtggtgagcgaaatgtgttgccaggcgctgagacgtgagcgggcaggtttcatgattcgtcttcgcagcggtaaccgacgccgtgaacggtatggatcagcttgagatcgaagggatcgtcaattttctgccgcaggcggcgcaccgcaacatcgacgacgttggtatcgctgtcgaaattcatgtcccacactcgcgaggctatcaccgagcgcgaaagcacctgcccttcgtgctgcataaacagctgaagtaaattaaattctttattggtcaatgtaatacgcgttccggcgcggataacccgccgtttgggaatgtctatctgcaggtcggccaactcgactatttcttcctgcttaacccgtgctccacggcgcagtgcgacgcgaattcgcgccaaaagctcggcaaaggaaaaaggtttaaccagatagtcgtcggcaccgaggtccagccctttgagcttgtcctccagcgtgccgcgtgcggtcaggaacagcaccggcgttttcagctgtttgtcgaggcgtctcatcacttcccagccgtccatttcaggcatcatcacgtcgagcagtatgagatcgtagagaaattcttgcgccagatgcagaccgtcgaggccattagtcgccacatcgactacgtatcctgcctctgtcaggccgctgcgcatatattccccggctttgggttcatcttcaatgaccagaattctcacattgcttcccccgttatgcataaaacagcgggcgcacgcataagactgcgccctgccgggttaaccactacgactatttcagtgcgtgctgcgctgcctgctcaatcaaagcggccacttctttagggtgagattcatataccgagtggcttgctcccggaatttcaaccttatggctgtgagcacgtgcggcatacatgcgttcaagatcgggattaatgattttgtcggattcagccaccatataccaactcggttttaccttccacgctgggtcaggaatattcgcggtgaagacgctggcgttggtgggcatctgcgcgttggcttcaaactgcgcctctttcaacggcaggtcggcggcaaagtcggacgggaagtattgcggcttgatggtcagatagccgtctgctgatttggcaaaaggatgcgccgaatttgggaacttcttaccgttgctggcttcggtttcaccggcgtcgagagcgtgtgcggcgatatagactaggcctgcaacatgtgaatcattccctgcttcggtaatgattgcgccgccgtagctgtgtcctaccagaatagcctgacccttttgctcatcaagaatgcgtttggtggcggtgacgtcatcattaaaggaggtcagcggttcctggaccagcgtcacgttatagccgtcctgggtcagaatatcgtacacaggacgccagcccgaaccgcccacaaatgcaccatgaaccagaacaatatttttaaccggcgccgccaaagccggtgccgccgcacccgcgaacagtaatgcagtaatagacgaagtaatcagacgttttttaaatgagtttttcatgatttttccttaatgatagttgatgttaggatgctgctgcaccatggggaccagtctatggccgggggtcccacatcaacatgactcaatcattacaaaaaaatgacggagggcagctctttaagccgcttctcgctcaaaactttttcccagaaaagcaaaaaacccgctttatgggcgggtttttctgtttgggccaacttaactgctccggtctataccatcatcgctatcgtaagtttgcctcgctgttcacttattacagtgcaacaacgtttactgctgatgggcctttagcgccgttctcgatagagaactcaactttttgaccttcatcaagagttttgaaatcgttgctctggatagcagagaagtgtacgaacacgtctttgctgccgtcagcaggggagataaaaccaaaacctttaccagcgtcaaaccacttcaccaaaccagtcattttagtagacatattaatttcctttaaatttataccgccataaggcgagggaggtctgtttttttagttgtgatacttatggggcactaaagaaggaaattcgcggtgaagagatatctagtaaggataacgctaatacagtgaactactttactcaaattgctttcataaggtctgtactacaaaccgaggagtgcattaacgcacgccatcaaagattacgcaagcattattttttttaaagatttaggcggttagttttataaaacttaatctaaatcacaaaaaaatgttcagattcgcgtcactatttgtctaacaaatggaggagtgactatgaacattgtacaaggtaaaactcacagcaaagttaccattcaagatgtagaagtcatggttgccatgttggctattgttgccatcatcctttgggaactgctgttctagaccttaccagacaaggcgttagagcaaaatatgccgttgcatatcgttgcgcgttaacagagacaggcgctggaaatcacctgtcttaaaataagcagcgggatggagctaaccacagttggcaggattgattggcgacggcatcttactgtgcaggtttctgattgcacctacaaacttaagcattttttataaatgcgcgtaattggctatcggttgacgacgtttccagtaggctgtcggacgttagtaaccgctcgactcaagaacgaaaggcaagtcaatgatcagattggcaagcagtacagccaaactggaataaatgactaatttcagcataaggacctcagaacaccgcgataagaacgaggaaacctatcccgttcactaatatttagaaacgtgcatcatgaacggccaatccagcatgaccataaatgccagacttgccgcacaagcaataattacaaccttcatattgtccttaaaaatcaatccaataaatcttttccgctgaccttcccgagaaacattgcgggagatatttgccttcccgaaacggtcaaaaataagaagccttgactattcgcgctagtaatagcaaaaagcgcaaatgtgatcaatatcacgtttaaagaatgagcacttttcgtcttttccctaaaaatataacgataaatatcccctgtcgctttgggttgttatccctgtctatcctggggcaaaataggcttgaggatgaaacatcccactgactgttaacccctccatcaaggatctccagtgaccaaactaacccagcaacagtgcatcattctcaccggctttaccggaatactgcacggtgaattcgaatggtttcatgccgatctggaaagaaggctgggtcgtgaggtccagacctcagagctcggctacccggagtttatggaacaatgcaaggcattgtatgaagaagacttctctgcgctgatacctgattaactgcggcagcttaataaaaccggtctgccccatggccgcgccggtttcttcccttaaatacctcttttaacttctgaaatttattaaaacaatcagccaaccctcgtaatatttaatttttaacaacgattaggacgagtacggaaaaattcaacatacgggaaatctcgttgtattacatccagctttgctatttaatacgctcagtttcacaatcgaaggttatcttaaaacccttatttaaatgatacagaagagggcaacgcattttataccttcgtacattttatttaaaaacttttaataatattaagctgggtgataacgtgaatacaaaatatattgcaccatctattttacttaacaaccctttcgttgattcccctataattaattgtaagggaaatcaaatgagcattaataacaaaacctttgaagtcactgaaaaacataaaaggctggttatttgcctgctgaagggcgtcactcagaaaaacgatattataaatatcgtctggtatgaacaaggtggcatggtcagtgataataattaccatcaactgatccacaaatttcgcaatctgcttgccgataataatctgccgaaggcgatgctaagaactatcccgcgccatggcgccatgctcgacctgtcattactcccagagcaagaaatcgcaccaggcgagattactgccattgagttacaggccaggaaaccctttagcctgtctaccctgggcaacagctttatggaaagtattagtcagatagccaaatcgctgtatcgctaatctttcgccttaacacctgagcgcatcttctcttgcccgatctcaataactttcgggcaggagcgaatgacctgagtcacaaatccccccatttatttgctcttattttgaccttagagcatatcaacgcgttaagcctgtatacttaagatctcgtgagcccgaaagctcacctctcgcaaagagatagtctgatgaccagatgggcgttcccactgaaatggcttttattttcattaagttatttagctctggccttcctatgccttgaaacacgcgacagcagcagcctttcctcggcgatttggttacccgcaggcttaacgctcggtattctttgttcatctcccctttcacgttggccgctatggttagttagcgcgggcacactgcacgttctggcaagctacctgcatcaccgcccaatggatattacgctggtttttgccgtcactaatctggttatcctctgtctcagcgcccacgtttggttgaccctcatgaagggccgcggtatcgccagcaacctcagcgcaatggccctgtttatcagcatcgttctggccgccagcgcactcggcggtatgactatcctgttcgctttacgcatgcttgcttaccccactgtcgtctctcattttgtaagctggagcatttccaatgcgaccggatgcctggcaatggcgccacttttcatggttaatcagttggttatcaataaaagggttaaaagccagaacctacttttgattaccggaatactgctcattacgttggcgctgtttttacctgattacgattatcagcaaaatattccgacagtggatttctcactttatttgctttttggcctaatattgctttcgttgttgtttattacagaacgaaggctggctctattacaggtcattattgcgcttattatcagcaccacaaccatttataatcgcggccctttcgcagacagtttctattccgataacaacggtattaccgcttctcaactttatcttttagccatattcatctcagcactgctggtgcgaagcgggataaccgatctctattttttaaaacggcaaagcgagcgccaaatattactgatgagcgccaactttgccgaacagaagagttacccctttcgcataaacgtcacgcagcaaaaggttatctggaccgatgtcttgaagatgcctgacgctttaccgcaggcagcactcatgactccggcacaaattctcgggcgtatgcatcccgatgacagaacattattttcaccctggtttatgggagcgaataagacctcagtaaggccatttacccaaccggtgcggcttattttaagcagttctgatttctgtaaggggcatatcgccctgctgagtgaccacgacaacaacgcaaacctctacctgaacggcgtcctgaccctttatcagggcccctacccgagccagtgagacagctaacatgaaaacagttctgattgccgacgaccatcccgtttatctgctcgggcttaaatcgctcctggagacgcagtttgccagggattacaccctgagtggcaccgcgagcaacgtcgatgagctgctggcgtcgctcaaaaatgctcaacctgatctattgcttactgacttaaccatgccgggcactcagcattctgacggtttacacctgattcagtttttacgccgcacctatccctcactgccgattattgttatcagcgtgctgtcaaatcaggctatcgcgaacttgatgctgaattccggcgtggtggccgtgattaataaacagagtctgagcacagaacttaacgcctgtcttaaggcgttggcgctggggcaaagcctgacacgaacccgcaagactcaggggcttaaaaatcttgccgatgacagccacgctcacaacgtacctatcagccccaaagaaaccgaagtcttacggctcatgaaacaggggcagacggtaaatcaggtcgcccaaatactacaccgctcgaaacaaaccatcagtggacagaaaaaaagtgccatgcacaagttaggtctgacgacggatgccgatctgtacgaatatctgcttaagattgaactgtgattcgcagctcgagggtccttattttgttgctgctgtgcctggcgcagcaggcctatgccgaggtattacgcatcggcgtggataacgtcagcgtgcgctacagtgaaattaacacccgcgttcagaatgatgacatcgagccggcgattatttccttacttaatcaacagcttcatgctcagggagagacatcgctgactctggaggcggtgtatctctccgacaacatcatcaagaacggcctgttgggcagcaacgccctcgacgccgttttcatggaaacctcattcccgccagtggctgacggcgaaattgaaacacttccgctcttcaccacccactggcgcatcgtctcactgcccaaccgccgtcagaatgccgagacaaatcttaacgaccttaacgataaacatattatcgtcgtcaacgacgctccgctctcggcgttaaaacagcgttaccctcgggcgatgcttatcaccacagcgtcattgggcgaggcgattgcgctgctaaaagccggtgcaggggacggggtattctgccgtcaggccgccgccagcgtattgagcgaaaacatttatcccggtgagctgcaggtcagcgacgtcgatagcctggtaaccgagacccatttaaggatgcgggccgacaaccccgccgttctcgcggcacttaatcgggccattccgcagcttccccaggacaccatcaaagatattctaagccgtaatttcaccgtattgaccctgatgaatattgtgcccatgctcaggcaaacgcaccgtaacttcgataccgcagcggtggccgtcggcgtcgcatcgctcttcctgattagcttcctgattgggcaggtggttcgccgcagacaggccgagcagcggttaaaagactcggtaaaattttgggaggtgttgctcaacagcctttccacgccggttctggtgtgcaacgctgccgggataataactcatgtgaatcaggcactttgccaaagtctaaacatcgacaggcggcgtattattggcagtatggtcgaagggttgaacaaacagttttttacctcacctgcgctggagacggcaggtttggtaaaggcaagtcaggccaccgagccgcagtttttcgaggggcactataccctcaatcagaatttacacagcatcgccggttggataacgccctacagcaatacatctatgctgccacagggtctggtgattggttggtatgacatgaccgagcgcatcaaacttgaggggcaactggctcaggcactcaccgaggccaaagcgttcagccatgagaagagcgaatttttggcacggatgagccacgaaatccgctcacccatgaacgttatcatgggtgtgctagagattgagaatcagcgcctcaacaacccacagtctcctatcgccgtggcctataacgcctcacgtgggctactgcaaatagtcggtgatattctggacttgtcaaaaatcgaagccggtgaaatgcagctcaagccaacgccggtctcactctttaccttgctgacccgtgctgccgaggcctatcagacgctggcgaagaggaaaggcctgaacctgaatacccatatcgaaagctgttttggccagtattatctgattgatgagggcaaactcaggcaggtggtcaataacttgctcagcaacgcggtgaaatacactcagaccgggcacgtcgtgctgtcggtgcgacgggtatcccagagttcctcagataaaaatcaggaattaatcattagcatcacggacagcggcatcggtattgcgcccgcgctgctgcccggcattattaaaccctatcggcagatatcctcgtcaacgccagacagcaccggacttggcctgactatctgtcatcaacttgtcgtcctgatggggggcaagctcgagataagctcgcgtgagaacatcggttcgacgttcagcgtcaggctgacgctgaaacgggtggaggccgaccaagcgccctcctccacggcagatttttcggcggtcaacaaagggtttaggctctgggttatcgacgatctgcccgccaacctgttggtaatgaaaatgcagctctcggcgctagggcatcaggtgactacctttaacaaagcagccgaggcgctcgccgagctgcaacgtcatccagcgcctaaagtggatatgattctgaccgactgccagatgcccgagatgtctggctatgcctttgccaatcgggtacgtgagtgggagggcgacagtccgtctcatctgcccatcgtgggctgtaccgctaacgctttttccgacgaggaaaccaagtgcctgaaagccgggatggacgctcatttgaccaagccgatgacgcaggcggacctaaagaactgcttgcaggagttgctgcaaaatcggcgtatcgacctcgacgaggtgatggcactttctgccgggcagtcgactattatcaataatatcatcaacgagttaaaacagagcagcgcagaggatctgctgctgatcgagcaggcctggcagactggagacatcgacacgctcaaaggaaaggttcatcgcctaaaagggaattttgcgctaacgcagttcgaggcggggcaaaacctgtgtcttacgctggagagaaagctgtcgcaggatggccgcgacattgagcgctatctgttgcttttgcgccacaccacacgacacttcatcagtctgctgcaagcgtttcagcccccaacttggtcacaccgcccgcccgctgattaatttttgttctatcatgttaattggttgaaacctgatgcctcgagagagaaaataggtcgattttatttttcacagtgatatcagtgtcggacctatgaacgcacgcaaaccacgccgtcccccggacgttggacgtattacatcctgtatgaagacattctgtggccttgcccagtccgatgggagtgggaaagtggctacggtggctggctgcccttctacttttcgccgacgctggagttcgtcgccggggatccgtccaaggcgacgaaagtctcgggcggccgacctgccacagccagccgcattcggcaacttgcctgtctctcagaggagggctaacagcctgccttctcagttgactctgccatccgcgagccgggcgtaaatccgttgttttttgcacgcagtacaatagccagactcagcaccaatagcagcagcatcacccaggggaacgacgaaacaccctgcgttttaagcagcaccccccggctattcctcctcctgcgattgccagattccaggccacgacaatcatcgattgtgcgatgtctgcgctgtcacccgccgcgtctgccgaagcggtttgcagcagcgttgccgcaccgccgaaggtcagaccccagacaaaaatgcccagatacagcaccgacgcagaggcccccagaccgccaaacgccaggcaggtcaacgcaaaaaggacaaggctcgacagcaccgtgcgacgcagccagcggtccaccagccaaccggtcaacccaatgccaagcatggcgctcaatccgaacagcagcagcatcttgtccacctgtcccgcgagccctgaccgagccaaaaaaggcacaatgtaggtataaaggatgttgtgcgccgttatccaggtaaagataacccacagcaccgaacgtacgcccggcagttgccacacctgatatagcgagcgctgtttctggcgtgactcgcccgggaagtcgggaaccttgagcaggatccacaccgttagcagcagggtcatcgccgacatgaggccgaacgcggtgcgccaccccactagcgagccaaaccaggtacccagcggcacgccgagcgacagcgccaacggcgtgccgatcattgccagcgtcatggctttaccctgcaaggcaggctcgaccattcggcgggcataacccgcgatcagtccccacgccagcccggccgaggcaccggcaaagaagcgtgccaccagcgtcagactatagtcggtcgaaaatgttgtcagggtgttgaatagcagaaagcccaacaccgatgccagcaatgcccggcggcgacgccatccacgggttgccaccgttagcggaattgccgccaccagcgaaccgagggcataaagcgtgaccatttgaccggtcattgaggctgaaacacctagaccgctgctaatctgcggcagcagtcctgcgggcaaggtttcggtcatgatggcaataaatccggtcatcgccagcgccagcagccccgaaaccggcagccttgaagtgtcgctcatggctgtgttactcctgaaagactcgcatacacggcgtcacgcagttcgttaacgaatgcgcccgacattccctccatcatggtattggttaacgcgaccaccgtcagttcacgctgtgcgtcgacaaaccaggaatggccgtagaccccacccagcgccaggtgccgacggattctggcgagccagcttcctctgggtcacgcagcacagaaaatccgaggccaaaaccgaagccgggcgcatctggtaaaattgcgcctgccgtctggtcgcggcccatctcctcgattaacgcttttgaaagcagaccgtgtttgcctgaacgcaaggactcgaagaaacgcagcaggtccggtgcgctaccgaccatacctgccccgccgaggggaaagcctcgggatttagaatgcgctttggcgaaaagcggataccggcggtatcgggaaacggagcaacatattcattttcctgcaatatatgcggctcgggtctgtcgttgacgtaagcggtggcgaggcgctcaggccacagggtgtaaaaaccactgtcgtgcatctgtagcggatcgacgattagagctttaactgcctggtcgagccgttgcccgcaaacctgctcaatcactgcacccaatacatcgacggacaacgagtagcaccaggcgctacccggcgtgaaaagcagcggcacgtcggcaatacgttgcaggttttcactcagtgagtgcgtagcgtcgtccataccgtcagagactcccgcacgcgcgtaaggcccctgctcatcgctttccagaaaacggtaaccgaaaccggcggtatggctcattaattgacgtacggtaatggtcgccacctcaccgttcggcaagcgcggatgaaagtcggccaacagcgtattcagcgactgttcgagatgaagacgcccttgctggacgagcaccatcgccgccgcggtaacgataggttttgacaccgatgacaggcgaaacagcgtcgttaaagacatcacctgctgcgtttctctgtccgcccagccgtgcgcgcgctggtagcgcgtctcccccgatacgcgaccatgactaccgcaccaaccagacgtttctcttcgagtgcacgttggataacggcatcaaccgaagcaaacggcgacgtttccgcgacctgatgctcactgctttttgtttccagagctgagagttgcataatgctttttccaaaagtaatgaaccagagattcaagatagatcgctaggggttacggaaaaagtggggtagatttctcttatctgcggacctttttgtccgcaatggggagaaacctatggacagcctgagcagtctcggcgtttttgtacaggtggcggaaaccggcagttttgttgccgcaggaggcgtgttgggcgtatcggcctcggcaatcggcaagagcatttcgcgactggaaagccggctgaacgtgcggctgtttcaccgcagtacgcgaagcctgacgttgacggcggaaggcgcgctgtttctcgaacgcagcaggcgtattttggccgaatttgaagccgctgagcacgagctgagccttgcgacccagtttccacgcggcagattacgcatcagcctgccgatggtcggttcactgatgctgccggtattgagcgaatttatggggcagtacccagacattgagctggagcttaatttcaccgataaaatggtagacgtcatcgaggaaggcttcgacgcggtgatccgcaccggagagataaccgactcacgcctcaacctgcgaaagctcggcgattacaccaaatacgtggtcgcctctcccgactatctggcgcagcacggcacaccacaaaccttagaagagttaccccagcacagctgcctgcactaccgtttcagccgcagcggaaaaatcgaaccctggccgctcacctttgataatccggtcgatttgccgctgtcgatggtctgcaataacctagaggcacaggttttttttgccgaacagggccggggaattacctgcctgcctgagttctcggtacgtgaaggtctgtccgctggcagattgcacagcgtgctggagcagtacgtctcccaccgtgcatcgttcaacattctttggccctcgggcggctgcatgacgccgaggctccgggtgctgatcgactttctgtgtgaacacacctttgccgtcgaccgctaatgtgcagcaacaccctgctcaaccgctgaaatgggcaaagagcgaaccaataattccagaagcgcccatggccagcgcgctccagaaggtgactcgcaccacgccgcgcaacaccgaggcaccgccgactcttgctgcgagaccaccaagtatcgccagcgataacagcgtcgacacgacgatagcgccgatgacccaggcgtgcggcaccagtaacgtgactaacagcggcagcgcggcaccgagggcgaaactgcaggcggatgtcagcgccgcctgcaaaggacgtgccgtcgttatctctgaaatacccagctcgtcacgggcgtgtgcaccgagcgcatcgtgcgccatcaacgcttcggcaacctgtttcgccagcggcaggctcagtccacgcttgacgtagatccccgccagctcgcgaaattcaccgtggtaatcctcctccagctctctgtgctcctcttttagcgccgcttcttcaatatccgcctgcgaagagaccgacacgtattcgcccgtcgccattgacatcgcgccagccaccagcccggctaatccagtgagcagcagaccgctgtggccgacctgcgccgcagcgacgccaagcaatagactggcggtagacacgatgccgtcattcgccccaagtaccgcggcgcgcagccatcccgcatgggagatactgtgtgcctcaatgtgtcctctgctcaatcgacaatccctcttctctgttttaaatgattgcaggcaggcatcgtcttgcatgccaaaggcgagatgacataattaaatccccacaacctgcataaatgagtaggccatgaaatcctcagccagcagaccgttgcttactattgaaagtaccagcgatgagcctttttatcgccagatttatcaccgcgtcagggcttctatcaaccaggagttgctaaaacccggcgatcgcctgccctcggcaaggcagttggcgaaagagctggggctggcgcgcgggactatcgagtcagcctatgcgctgttgtccgccgaaggttacattcagtctcaggggcaagctggaacccgcattgcggctaatgtgcagccccagcctgaaaacaaaacgcagccacagcgtgcgccgacaaaggcttttggtatgcataccccggccattttgccgctacagatggggctaccggcgatggacgctttcccgcgcaaaatctgggcaaggctgggcgccagatacctgcgcgccatgcagcccaatgacatgaaatatccggcgcaattcggactccctgcgctgcgggacgcgattgcggcctatttgcacatggcgcgtgggatagcctgcacgggcgcgcaggtgtttatcacctctggctatcgcagcaccttgcaactgattgctcacaccttgcttaaggccgacgacgccgtatgggtcgaggatcccggctttccgctaacgcgtcaactgctgaataacgcgcagctcagacaggttgccgtaccggtcgatgctgagggaattcaggtgcatagcgggataacgctggcaaaaaatgcccgtgcggcagtggtcacgccagcgcatcaaagcccgctgtgtgtttcgctgtccctgtcacgccgtctggcccttctggaatgggccacacagcaaaaatcatggattattgaagacgactacgacggtgaatatcgctacgtcagccgtccgcttccagcgctgaaaagtctggataccgcagggcgtgtcttatactgcggcacctttagtaaagtactgtttcccggcatccgacttgcgtatctggtggtaccggaaaatgaggtgcagcgctttgagcaggccagtctggggttcttggaaggtatgggtgagatgaatcaggcgattgtcagcgcttttatgcaggaaggacacttttcgcgacatattcaccgtatgagaaagctgtatgcagaacgacgcgagcatgcggcagcgggattaaacaagatactgagccagcatctgcacatcgacccccaaccgggcggtatgcatctggttttgcgactccacaacgacctcaacgacgtcgagattgccgcccgcatgcgtgccaacgggctatacgttcatgcaatttcaaactggagcagccacgccagtactgagcgtggcctgcttgtcagtttcaccaatattgaatctcaggcgcaggccgagaaaattggccagaagatcctgggactgctttagcgcagcccggatttttccaacccataggcggcatccgctgagccaggttcgacgcgaaaagcgaccccaagccggttccagccgttgatgccgataatcacgaagctgagatccgaaatttcctgctcggtaagatgcgtacgcacgcggtcgtaaatctcgtcggatacgccgtgcgcggacagcgtagtcagggcttcagtccactccagcgccgcgcgttcacgcggggtgaacagcggcgagtcgcgccagatggcaagatgatgcacgcgcaggtcacgttcaccgctgattttggcttctttaacgtgcatgtcgagacaaaatccacagccgttaatttgcgaggcgcgaatagtgaccagaatcttaaattctttcgccgcggcgcttttgctaaccgagttgttaaagtcgagatattttttggcaatctcggaagacacattgtaatagtcgatacgctgggacataaaaaaacccttttcagtatggaagatggttgcctgcaaggtatctgccgttgcggctcgtgatacctgatggcgactatcatcaccgcacttggcctagtgaaaaagcaccaagaatcggcttattgactgggccatgatgggctatccccccatttggtgcaactgttcaaccaatctgaaatggcggtttgaattaattaaatctggcacaaaaagactttgcataattgttattctttaatcatgcttatttagtgaaattcactttttcttaaagctggaactattttgcaaaacctcagagcctcagtgctcaacgctatcaagcgtacaccctggtatcccaagcgacgttcctatcgggtactgttctggcgagaaataacgccactcgcggtgcccatcttcttcgaaaacgcctgtgtgttgctaatggggtgttaagtacctttcttgtcagttggttaggcaaagaggcgatggccggggtgggtctggccgacagctttaatattgttgttatttccttttttgccgccatcgatctcggtactacggtggtggtggccttcagcctgggaaaacttaatcacgaacgcgcccgcgatgccgcgcgacagtcattaatcatcatgacgttgttcgccatactgctggcgatgatcattgagttttatgggcaaggtatcatcgatttgattgccggcaacgccgcgcccgaggttaaggcgctggcgttgagctatctgcgtattacggtgtggagctatccggcagcggcaatcgccctgataggctgtggcgcactgcgtggagcgggtaataccaaaattccgatgctaattaacggcggaatgaacatactgaatatcgtgatcactaccgtgctgatttacggctgcctttcctggaaggggctgggatttatcggcgcaggattagggctgacgatttcacgctatatcggtgccatcgcggtgctttatgtgctggcaatcggctttaatccctctctaaaaatctctctgaaaagctatttcacccgtatcaataccagtattttggtcgaggtgctgggtatcggcattcctgccagcatagaatcggtgctgtttaacggcggtaaactgcttacgcaggtttttgtcgccgggatgggcaccagcgttattgccggtaactttatcgctttctcgattgcctcattgattaacctgccgggcaacgccctcggttcgtcagcgaccatcatcgtcgggacgcgcctgggtaaaggtgagatagctcagtcagagtttcagctgcgtcatgtctattggctctccgccatcgggatttgctcgctcgccttgctttcagtaccgctcgcgggcctgctggcgtcgttctacacccgtgaccccgaggttattcacgtcgttaaaatcctcgtctggctcaacgccgcctttattcccttctgggccgcctcatgggtcctgcccgcaggcctgaaaggcgcacgcgatgcgcggttcaccatgtgggtatcgatgctgggaatgtggggatgccgtattgtcgctggttacacgatgggagtggtgctggggttcggcgtcgtcggcgtatggttaggcatgttcctcgactggatcgttcgcggcatattcttctactggcgtatggccagcggccgctggttgtggaaatatccacggcctgaaaaagaacctattcagaaagcgcaggaagaagagcaagtttcggtgcagggatgatgaccacgccggggcccgcccttacttacgtcaaggcgagcgcgtcgtgatttatgacggcgtctgccgactgtgcaatgggtgggtcaacttcctgattcgtcatgataaaaatcacagtgtgcgccttgtcgccgtacaatccgaggcaggagaggcgttgctgaaatgggccggattatccccgcagaacgtcaacactctcgtgctcatcgacggcgaaaacctgtataaacgttcagaagccatatttcgggtgatgtcctttctgccgtggccgtggcgtatgctcacagcactgcgccgattgccgctgccgctaagagacgcctgctataatcgcatcgcccttaaccgctaccgactatggggtcgttatgacagcgtaaaaaagttgcagtccgatcatcaggggcgatttatcgaggatgacgagagagggaatgatgaccactgagagctcagtggtcataggaagcctagttatggagtttgtactctaacgtaatttcagcattcagaaccttcgacacagggcaacctgctttcgctttcttaatcagctcgtcgaatttgtcctcgggaatacccggcagtttaaccgcactgtccagcttaatagccgttatggcaaagccgacgtccactttatcgagtgaaaccgtggccttggtatcaatgccttccggcgtaaaacccgcctcgccgaggataagagaaagtgccatcgagaaacaggctgcgtgtgcagcgccaatcaactcttccgggttggagccaggtttaccctcgaagcgagtattaaacccgtaaggctggtctttcagcgcaccgctttcagtggtgatggtccctttgcctttcttgatgtcgccttcccagtgagcctgtccatacttatgaatagtcgccataatttcctctgttctgtttaacacagaactaagtatagacgcttaaccgcattgggaaaggcagccggaaggatcccccccttccggcgcttatctccggcactcgcttgaaacggcgttagctctgtataagggggttgaagagataataccatttaagataaatctcatgaagaggatttacgattaataatcattatcatttacttatttaagcaactgttaccagatgtatctcatattgagcatttcttcagcatattgtgatgcaaaattccgccttcatggcctaaaacactgcacattgctcgtaaggcgagaacgatttagattattgcggtagagaattcgaggattcattcactttaacggaagccatccacatggaaaaacgccccactgttaccatcaaatactgctcacagtgcaactggctgctgcgcgcagcctggatggcacaggagctgctgaactccttcagtaccgatctcgcctccgtgacactcatgccaggcaccggcggtatttatgaaattaccctcgatgaccacattctttgggaacgcaaacgagacggcggctttccagatgccgcccagataaaacaaagggtgcgagatatctgttttcctgagcgctcactgggtcatattgagggtaagaagattgacaaataaatcagtttagctggaactgtttatccggtcgcagtctttgcggaaggttcgtttcgtcattcatttcacgaagattgatttcaataacgttgcacattgcgttcaacggtaggtcgttcggtgccgtgccgaacggatcttccagttcttccgccagcgcatccagcgagataaaggtataggaaataaataccgaaaccagcggcgtcatgtagtgcaaatcaggcaccagcgcgaaaggcaacagcgaacaaaacagatagaccgtgcgatgcacaatcaggctgtaggcaaacggaataggcgtattagtaatacgctcgcagcccgccagcacagaagacagctgattaatattttggtcaacgctctgaaacagaatgtccgacacctcacccgcctgacggcgctctcccagccactgcccaattagcagcaggattcgattacagggcgacgcgctgctctccagcgacttcaggtcgtgatttggcaaaagacgagccaaatcttcacgcattgacgtcccgcgcagctgatgtttcaggcaataactgaaggctatcagcagtgctgcaaactcctgcgccagttcaggatgctgcggcagaatgcttttaacctgtcttaatagagagcgattaacaatcagcaaacttccccaaagtacgcgcgcctcggtgaaacgcgcatagctgacgctgttgcgaaaaccgaggaagatggcgatcgcgacgcccagcaggctaaagggagccaacgtcagcttgacgccaagggcttcgtaccactggaagcagagaatagcgactaccgacatcgccagattcaagcttaaacgaaataagatctcggacagcacagaaccgtgccaaacgaacaatcttcggaaccaatgttgatggggtctgacaatcatagagcaggaattaaattagggggttaagtctgtgttatagcagattcatttgaataatatcaatcaagaaactaaggcaattaaggtttctttaaggccgttaatgcttgcctcaatattgcaataagcgctcaaaatttctgaatattgctgtggaagtcttattttaaggccaaacaaagtgcatcaggaggatcagacagataaattatcggttaactcaagccaactcaattagttaagagaaatttaaaatgacctttaaaggtaaagtctggatcggaatggtatgctcttcattaacattttggggcatcgtcggttatgccacttatctgcttatggcctgaaacatgcgcctaaataacctcatcgcaggcacactttgccattccgaataaatctttcacttactgtcactgacagccatcatcatgcggcaaataattcagcgtcactgcatgtggctgtttaaggtgcaggtaaaaaggcgttgacccgtttacgttcggcaaagctatgcagccgcggttttggctacgggtaactcaatagaaagtccttatatttgaggagtcttttcgaaaattaatgtcaggctttggctcattttatacagcgctttttagccaggttaacacaataaaaacatcgaccacgtcacaaattattcccgccttcgcaataaaattcacataaaatactttaaaaacataatgataaaattttcttcataaaacgagactattttttaaattgtcgccccctcacattaatgaaacatacaattcactaatattcatttgcgaatttttatttcaaaaaaagcaattttttatagaatgtctcattaacctgtacagaatcctttcgcaattgagtgcgctactgaatgtgaaaagggagggtaaaaatggctacaaacaagactcattacaacctggtctacctgatgctttgttgcaccgtcgctgcttttgggggcctgctgatgggatacgacagctcaatcatttcaggggcgattgaaccactcagtgcttacttccagctcggcccggcagaaaccggttgggctgtgtcctgtattcaagtatcaagcctcatcggctgtctggttgcgccaaaaataagtgaccatttcggcagaaagcgttcactttgcgtgactgccattattttcgcggtgtccattgtcggcacagcgctggcacataacttcaccgtctttattttgttcaggttgattggcggactcgctattggtttggcctgcgtgatttctcccatttatctggcggaactttctccttcaagatatcgcggtcgaaccaccgcgctttactctatttgctgtgttggcggtcaaagcgtggtgatgctgaccaacttcttcatcagtaaatcaatgacctccgccgttttagtggataccggctggcgtctaatcctttcctcggcgctggttccctgcatcgctttactggtgtttatctcgtttatccccgaatcgccacgctggagcgtatttaagggtcgcgataaagaagcgctgactaccctgggtaaaatttcaaaccttgaacatgccaaaaccgtgtttggtgaaatcaaagattcaattaagaccgatatccacagtacggtaaaagctaaattcacactgaataaaaaaacctttcctctgttaatcattggtattggccttgccttgggtaaccaactgagcggcgtaaacgtcattcagtattttggccctacgttgatgaaaaatatctccagcgataacaacactgcaatgttcctggccttcgtgcttgcctttgcgcagttccttggtgtcgtagtgggcatgtttctgctggataaagtggggcgacgtaaactgctgctgtggggcgcactcgcttcgacagtttgtctggcctactccttcgccgcattctatctgcgcttcgcaggggtatactctgtattgggtctgtttgcttttatgtttttgtttggtatcacctggggtcaggttatctggaccgtgttgggcgaaatcttcccgatggaaattcgctctatctgtgtaggtatttcggtgtgctcgctgtctgtcgctaactttgccgtcagcaccaccttccctatcatgaacagcaacccctacctgcagcaggtgtttcacggtgggttcccgctgctgctgttctcgggcttctcgttgctgatgttcctgtttacttatcgctatgtgcctgaaacagctaacgttccgttagaaagaatcgaagccatcgtgttgagaaaatactatggtcgcgatatcgaagacgacgttgaaccggttcacggcgaaaacatcggcccctgggtgatggcataaaataagcgttcctttgacctgaccagatggcccggctcctcatcatgagagtccgggtcatttgtttatgggatagacataaaatgaattaaaaatgtcaaaataggaaatttcatttcattttgccagcgagttcacaatttaatttattttttataaaaaacaacaaattaacaaaataacgcaagactaaacctttcaccaatatgataatttgtgagcaacatcataaaaacaatgcgttaaaatatttcatttatattgaaaatgaaattattaatccttaatatactttaaaggccattcagcttgggttgaggataggaagatgaacaacgtgcaaaagaaactggatgttatctgtttgggacgtatcgccgtcgatctgtatgcgcagcaaattggcgcccgcctggaagatgcaagctcctttgccaaatacctcggcggatcgtcgggtaatgtggcttacggaacggctattcaggggctgcgctccggcatgctcgcccgcgtcggcgatgaacacatgggacgtttcctgcgcgaagagttaacccgcgtcggcgtcgatacccaatatctgattaccgataaagatcgtctgaccggcctggtgctgctgggcatcaaggatcaagacactttcccgcttatcttctaccgcgataattgtgccgacatggcgctgaagccacaggacatcagcgaagactacatcgcttcttcgcgcgctctggctatcaccggaacacacctttcgcatcccgatacccgccaggcggtgttgaccgcgctggactatgccaaaaaacacggcctgcgtcgggcgctggacatcgactatcgtccggtgctgtggggcctgaccgcgctgggtgacggtgaaacccgctttgtttcatccgagaaggtcacccgcgagattcaagaggtgctgcatcactttgacctgattgtcgggacggaagaagagttccacatcgcaggcggcagcaccgataccctgaccgccctggcgcgcgttcgtgaactgaccgatgccaccctggtctgcaaacgcggtgcattaggctgctcggtatttgaagagcagatccccacgtcctgggatgaggtaaaactgcaaaccggcgttcgtgtcgaagtgctgaacgtactggggcgggcgacgcattcatgtcaggcctgctgcgcggttatctcaatgacgaaggctgggaacaagcctgccgctacgccaacgcctgcggtgcgctggtggtttcacgccacggctgtgcgcccgccatgccaaccaaaaaagagttggacgactatctgctgcgcgacaaatctgtgccgcagccagacaaagacgcccgcctgaaccacctgcatcgggtcaccacccgcaagcagcagtggccagaactgtgcatcttcgccttcgaccaccgtaaacagcttgtggacatggcgcaggaagtcggcgctaacgtcaacgagatcccgcgtttgaaagtattgctgctcgagggtgcgcgtcaggcggctaaagaggccgggctgcgtaacaacagcggtattcttgccgacacgaccttcggacagaacgcactgaatgccattaccggcgaaggctggtggattggtcgcccgattgaactgccgagttcgcgtcctctgcgccttgaacacgggaacattggttcgcagctgatcgattggccgctggaacacgtggtgaaatgcctgatgttctaccatccaaaagacgatgctgcactgcgtgaagaacaggaggccttggcgctggaagtttaccaggcgtgctgcaagtccggccacgagctgctgctcgagattatccttccgagcgacagtcccttccaggacgagaaatattatgcccagaccgttgagcgcttctactccctcgggatccagcctgactggtggaaacttcctgcgcaaagtgtcgaaggctggaaagcgataggtcagcttatcgacaacaacgatcctgattgccgcggcattctgatcctcggcctcgacgcaccagaatctacgctgaaaaccggctttgcggccgcagcagatattccatgggtcaaaggctttgcggtaggacgcaccatctttggcgaatcctcccgccagtggctggcaaacaagtttaatgatgaagaactgattaacgacgtgaagcagcgttacctcacgctcatcaaatactggcgtgaatatcgcccggctagccatcgctaatactctgcccttggggcctgacttccgctcgacagtcaggccctcgctattttcagctttgtcgcatttaaccgctcatgtcattcattaaccacaatgggttccgccgatgacgacattaattcaggagccacaccctcgccgccttttattacggctcagtatcggcatgtttgtcgcctatctgtcgattggcctgccgctggggattattccgctttacgtacatcaacagctagggctgaacgacgtgatggtcggtatcgccatcggtacccaatttctgaccacgcttatcacgcgaagtaccgcaggccgctgggccgatcatcagggcgcgcggcgcaccgcctttctgggcatggccagctgcgtgggttcaggcattgccacgcttgctgccgcgttgatgccgggaaatgctctcgcgctggcttacggcctactgatcggcggacgcgtactgcttggcgtgggcgaaagcctgttactgaccggcaatctgacctggggaatggggctggctggcagcagtttggcgggtaaggtcatgtcctggaatggaatggcgacctatggcgcgatggcagccggtgcaccgttgggattagcaatttaccactctcaggggatggccgccgcctcgggtctgatgttggtattgccgctgattgcactggttatcgacaaaggcgtaccaccggttgccgtacatactggcaaaagacagctgctcagcgctatttggctgctcatctggcgaccgggtctgggccttatgctacagggtatcgggttctcggtgctcagcgtgtttgtcaccctttattttgcccaatttggctggccatatgccggttttgcattgacggcgtttggcagtgcgtttatcgccgtccggctgacttttggcaacctgccggacaagatgggcggcattaaggtggcacagttttccttactggtggaatgcgccgggctgctgctgatttttctggcggttaatcccttgatggcgctggccggtgccgcgctcactggctgtggctgttcgcttatcttcccttcgcttggcgttgaggtagtgcgccgtgtaccgccagaggccagaggtacggcattgggggattttcggcctttcaagatttggcctatgcgttgacaggccctctggctgggattctcacaggccacgcgggctatcgcagcgtatttttgctggcagcggtgtgcgcttttctcggcatgctgctggtgaaactcggtctgacaaaacgaggataaatccacgccccagtgtccagaaaacacctgtaatgaactttttataccgttaaaatgaaatgtcagacattctcgtgcgcatgacaacggtctctatgactttttcagcccaggccttatctgacggcatttcatcaaaaatttaaagcatttaaatcatatagatataatcttaagacctgtattttaggtgcacatctccgcaagttgagatcataaaatcctgctaccgatcacagaaacataaattccataaaatttaatttgaaacatttagttcaaagtaataaggttaattcagtcgggcgatccttagcagggtccagcatactcatcacggttctgaggtaaggtagagaagatggaaacaatcgcgaatttcattaatggccagctccacacgagcagcagcaaagaaactctgccggtaactaatccggctaccggtcaggtcatccgtcaggtcacacaaagcaccgagaaggaagtgttacaggctatcgagcatgcacacaaggctttcccttcatgggccaagactccgcctctgcgccgtgcacgtatcctttttgaattcaaagccttgatcgagaagaaccgtgatgagctggctgaactgatcaccagcgaacacggtaaagtctattccgatgcgctgggtgagctgacccgcggtctggaagtggttgaattcgcctgcggtattccgcacctgttaaaaggcgagtattccaacaccgtcggcactggcgtagacagtttctcggtcatgcagccgctgggcgtggtagcgggaattacgccatttaacttcccggcaatggtgccaatgtggatgttcccggtcgcactggcctgcggtaatacctttatcctcaagccaccggctccagccccttctgcctcaatccgtctggctgaactgctgaaagaagcaggcttgccggacggcgttttcaacgtcgttcactgtggcaacgaagccgccagcctgttaaccagcgatgaacgtatccaggcagtcagctttgtgggctcctctgcggttgctcagcatatctacgctaccgccagcgcccacggtaaacgtgtacaggcgtttggtgccgcgaaaaaccacgctatcgtcatgccggatgccgacctcgatgcgaccgtgcaagccattatgggcggcgcattcggctctgccggtgaacgctgcatggcgctgccaatcgtggttgccgtaggtgatgacaccgccgacaaactgattgctaagctgacaccgctggtcaatgcgctgcgtatcggcccgggaaatctgcgcggtaaagaagaaaatgaaatgggccccgtcatctctaaggctcaccagtccaaggtcgttggctatatcgatcagggcgttgccgaaggcgcgaaactggttatcgacggccgcaaccacaaggttgaaggtcatccggaaggcttctacgttggcggtacactgtttgacaatgtcaccaccgatatgaagatttaccgcgaagagatttttggaccggtcttaggcatcgtccgcgagaaagatttcgactcggcgctgaacactgttaacggccatgaatttggcaacggcagcgcgattttcaccaccaacggtcactatgctcgtgagtttgtgcaaaacgttgaggctggcatggtgggtgtcaatattcctgtgccggtaccggtggccttccactcctttggtggctggaaacgctcggtgtttggcgcgttgaatgtgcatgggccagacggcgtccgcttctatacgcgtatgaaaaccgtgaccactcgctggccaaccgggcaacataccgttgccgagttcagcatgccgacgctgggttaatattttctacataaggagaggaacatgtcccgcttgctcagtaagcatgccccgtcgaaagacgggcgtatccagcatattacgccagaaagtgcgggctggaagtatgtgggtttcgacgtttatcaacttgaagagggtcagacgctgaccctgccagcggatgataaagaacgctgtctggtgctcgtttccggacgggcaagcgtggtcactcctgcagaaaagtttgagcatattggccaacgaatgagcccgtttgagcgcattcccgcgtggtcggtctacgtaccgcacaatacgccctcagaagtgaaagctgaaaccgcgctggagctggcagtatgcagtgcccccggcttcggcaaattgcctgcacgactgattgcgccgaaagacgtcggcgttgagcgtcgcggcaaaggacgtaaccgccgtctggtgcataacatcctccctgacgacaagcaagccgacagcctgctggtagttgaggtttataccgatgaaggcgattccagttcttatcctagccacaagcacgatacgccggtggaaggtaaggaaacctatctggaagaaacttattatcaccgttttgatcccccgcagggctttgcgctgcaccgcgtctacaccgacgatcgcagcctggatgaatgcatggcgccatacgatcgcgacgtcgtgcaggttccacgcggttatcacccggtggcaaccattgccggttacgataactattatctgaacgttatggccggtccggaacgtaaatggcaatttacctgggaaaaggaccacgcctgggtaaactcagatcaatatccaagaaataaggtttaatcagttgcattaggcctttcacttcaaacttctaagcagcctccgggctgctttttaagatctttgattaggaaaatattatgtccacggcccttagctctcctttccagttggcagtctgcgccgaaatggtcttcctggacttgccttttgttgagcgtgttaaacgtattcatcaggcgggatttgcggtagaaatctgggactggactcaaaaagacatcgacgcgcttgccgcaaccggtgcacgctttacctcaatgaccggctacatcagcggtgatctgctggatgatgacggcattgcgcgtctgcttgaaacagccgaagtctcgattgagattgccaggcgcctgaactgccctagcctcaatctgcacggtaccggcctcgacggacagggattgccgctcaaaccgaaaaaccacgtcaccggcgcgatgtggattaaggcctataaaacactgagcgaaattgccaaattgggcgaacgccaccagcaggtatttttgctggagaacctcaatacccaggttgatcatccgggaacccccttcgccagcgcacaagacactctgacgctgatttcagccgtcgacagcccgtggttaaagatgaatctggacctgtatcacgcgcaaattggtgaaggtaatctaattgagttgattcgccagtcggcgccctacattggtgaagttcaggtcgcagatgtaccaggccgtgaagagccgggcagcggagaaattaactacccggcgatcgcacgcgcgctttataagacagggtatcgcggcgtggtcgggatggaggcatgggcgtcgggggattccaacagcgcgattgcgcgctttttggattcatttggcggcgattttatttgaaaatcaaaacctactctgcactacttaacgctaacgacactgcaatagtctgcgcaagacacattgatgcaacctgtgaacggaaaccgtcgagctgggcctcgcgcacgacaaagcagacgtcgctgaatgccgctaatgggctgacctggctgtcggtaatcgctatctgccgcgcaccgcgacgtgcaccgagctggacgagttccatcgcttcactggcgtaaggcgaatagctgatagcaatgaccacatcttttgggctcaccatgctcaactgttctgagaacatcccgccgagtccgtcaatcagaaacgcacgacgctccagatggcgcagcgcataggttaaatagctggccacgctgaaggaacgacgcaggccgataatatagatgttttccgcctgcgagagcatggcgatcgcttggtcaagctgttcggcggtaatgtgtgcaggcaactgctgtagcgcctgcgcattgaccatcgagaacatgttcaacacttcgtccggtttttccggtgcggcagtgccttcctcggtagaagactttcgaaataagcgcgcacgctcggtatagctgaccgtctcttccatcaggtgttgacggaatacttgtttcatttcgttgaaaccgctaaagccaaaagcgctggcaaaacgaatcaacgtcgagggcggcacgtcggcacgctgagcaatggacgccaccgtatcaaacgctacgctgttgctattatcaagaatatagcgtgctacctgtttaagacgcttgctcagactgtcgtaacgggtacgaatgtcttcctgtaaaatagacaattgagtggtatgtttcgacacgggaagccgcccttaattaacatcatagtgaatgtttcagtttaacaaaatgaacaaaaaatttcattcgtagacaccaagccggatcccactttaagaacatccttgttcttactctccggcgctaacggtgagtccaggcagtcaggctatcgaaattgtctttacccctttgccacaggtcatctttcaaatgcgtcgggctaagcggctcaggacaccacacgtccgccacagaagtgaataccgtagataagattgacgtccattccgcgacctcttcgggcttatgccccccaatgcgcctcaggccattaataccgctaacctcaggcgcatcaaaccctgtttcagtggctattctcagcggtgtgacggcgttgctatccccaaaaactatacagagactccgtggaatgcctttttcattattctcaaaactaggtgaaacaggtcgctaaacagttcgataggatctactgtgcacaaagcgaaacaaacaagccatttattttatttatgaaattcacatatcgtgacagccgtcaaattaacgatggatacccctcaagatagtgctggacaacggcaaggagcctagcgggactgactaaaacgctcatgcagacgaacacaaagtacatagaaaccttccagcaactcttcaagacgcgcctcttcatcaaaacagtggtcatccaccagcgctttcagctcatagccttcgctgccaagcccgagaaccggctgacccgtcacaacccagcacagcgccgcctgtaactcttcccagagttctgcccccaggaggtaaaggttgagctgtccatccatgtcagggcgctccacagccataatctgtcgtcaatgacagagaaaaacaggctgggaatgttggcaaaactgatttcaatggtggagtgggcgtcaaactgattttcttcaaccggataacccatgttgttcaaagtcttacacaagcgctccgcaatgttatagttcattcgttctttccttgaaatttttgatttttaattgaaaaacagaaacccattagccgatacaagctaaagcgcttccgttttatacacagctataaatcgctcaaactgcggaggaataatgcatccagagctcaaacacagtttttctgtggagatcaaagtcgataaaccgatagtcgtgaatgccacagcagaaggcggaaaacgccaactgatcgcgattctagaagggaagtcagcggaagattacgtgggcaggtactaccagggggcatcgacagccaaattattcaccccgacggaacctgccagctttccgcgcgatacggactggaaaccagcgagggccgggtctatgttgagaataacggcatccgccgcattcctgcggagtggagagaaaaactgtttagtgacgatatgtcgttctttaatctgatcccgcaggaggaaatctattttcgtgctgtccccaagttcgaggtgtatagcgaggcactgcgctggatgactgaatctatattcatttgcactggccaacgaacggcgcagggcgtctctctcaagttttacgagttaacttagcggattaacgcactacgcgccggccctgctaataacggccagcgcgtaacagaacaacatcagactttgcgtttctcaatggtgtttaacagccccttcactttcgcgctagaattatattttgcataaaaataatgctcgatctgctccaggctgcggccacgcgtttcgggaatacagcgaatgacaaatattccgccgccgataccgataacgccgaagataaagaatgctcccgccagaccgaaataggccagtaacagtggaaacgccatcgagataataaaattggctatccacagagagaatacggctcctcccatgcagatccccgcattctggtcgggaaaatctcagacagtaacagccacgtgacaggtgataatgcgccctgctggaagctaaggaacagcaacataccggccaagatcatataacaacgaacaagattcactccgccgttagcatgaaattcgggcagcatacagacgagacctatcaggaataagcaggcagtgcagcctatttgccctatcaataccaacggacggcgcccaatgcggcccagcatccaaatacctacgaaggtcatcaataccgatattacgccattcgcaatggtggcaaataaagccgcatcggtgcttagaccagacattttaagtacggttggcgcgtaatacataatggtattaacgcccgtaagctgctgaatagtggcgataccgatgccaagaaagaacagcttggctaaccaaggtgtggccaaatctcgcagtttccctttacctttatggcggttctcttcaatagtctcctcgatttcggtcaattcccactctacatcctctttggcacgggttcgttccaaaatacggcgagcctcggcaaaacggcctttcatggcataccagcgcggcgtgtctggcataaacatcatgccgaaccagagcatgattgcaggaatagtggcaatggccagcatccaacgccaggtggtatcaccgccccagatctcgtggaaggttgcgttagtgatatacgccagcatttgcccgataacaatcataagctcctgcatggtcactaattggccacgccgattcgctggcgcaatttctgcaatataaaccggcacagtcgccgccgcaccgcccacggccagaccgagaaccagacggaagaaaatcatccaattcacatcgggtgccatggcggtacccgcagcgcccaccgcaaagataatcgccagtaggataataattttcttacgcccagcgctatccgcgagatgtccggctgccaaggcaccaaatgctgcaccaaacagcaaggagctggtcactagccctgtggtaaaaggagtcaggtgtaattctttgcccataaacaataatgcgccagaaataacgcctgtgtcataaccgaataacaggccccctagtgttgagatgatagcaatgaccttgacgaacggttctgtcttggtcgtgctgttcgggccggaggccgtattttttgttataaactgttcatgttccatagtgactccaatgatcgtttagactctgttgtagggacatattgcagtaatagtaatgggcaacaattaatctaaatacttcatcaattaggaattgatatctcatctggctaacatgatatgtaaccccgtcatggtgacttacaaattaaacccaacattcatcaaaggcttttaattctaacttatcgaataaatactttatttatcaccgcgcgtagccgttggtactcaattactcgctgagtgaaatcttcttttttacgttaatttttttattaataacctgtcttaatgatttaactcccgcgaggcgaattaattaccccacggggaaaacatcaataaaccaatatctaagaaatgacgttaaattccagccacttcctgaatgtaacgacgcgccttgagggcatattcaaacgggttagctttggcgggatcctgttctgcctctacgacaatccatccttcgtaaccaaaatcctctaataactcaaagaccggcttgaattgtataattccatcacccggtacggtaaaagtgccttttttaacaccctcaagaaaactcagtttatgagtacgaacctcattcactatgctgtctcgaacatcttttagatgaacatggttaatacgtggcaaatgcgccttcaggatttgtaacatcgcttcctgagatccttcggaataataggcatgaccggtatcaaagagcagataaacatcgtcattgacgatatcaagaaaatgctcaatttctttcgcggtttgaatgccagtccccatatgatgatgaagacctaccgtcattcctttctcggcagcgaggtcggccaattcgttatagccattcgccacgagttgccattcactgtcggtaaaaattggccgcccttcaagcacgggacgcggtgtgccctgcgtgctgcgcgactgctccgaacagccgataaccttcgctcccatcgcatgaaggaaatcgcgatgtatgatgaattcatcaatggtgcgcgctttttctccgtcggcgaaaaaagtactgaaccaggcattgcatatttgaatgccgcgcaaatccaacatcggcttgagaatttttggatcgcgtggatatttgctgccgacttcacttcctgtaaaaccggcaagcgccatctcgcttaccgtttgctgaaatgtattttccttgcctaaatcgggcatgtcgtcattcgtccaaccgataggcgcaatgccgagtctgactttatttttgtccatgataaacgcaccttaaagagtgaaattgtccaacaacggttttcaagccgccttatgcgaatttacgcacgagtattcaacgctcgtaaaaagccgggcgcggaggcaaagaaatactcactggacctgaggtgttttgcgctttaacacaagcatctgccgccgttgaggccgcatatccatcccaggcggaaggccccgtcaattcccctttaataacaccattaataaagtcttgtagttcggtatcataggcatcaataaaacgatctttccaatcggtgagaatattgtgtgaacgtttggcattgctgcgtaataaaacgctgcttggctcaggcaggctggcaataccgctttcccctactacttcagtttgaatgtcatagccgtacttacagttaacgaaaatttctacatcaatgcgtacacccttgaccgtttccagcaatacaatttgcggatcgcgcaatttagcgtgggtatgcgccgtcgcccgtgggaaaatgacctgagccgaaacaaaatcttcattcagaagccatcgtaatacgcttaattcgtggattagcgtattggtgattgccatatcggtactgtaactctcatccacggcagggttgcggtgcgcgcaatgcagcattaagggctgtccgatttcaccgctgtcgatcacttttttcaaggcttgataaccctgatcgtagggacgcataaaaccgacctgcaccagacgacggccataagcgatttcagcatcgacaatgcgtttacaaccttcagccgtgatcgccagcggtttttcacaaaataccggcttgcccgcggcaatcgcagctaaaacgaacgcttcgtgggtgggatcccaggaagtcacaatcaaagcatccacattggaggaattgatgacctgttcgccatcggacaacacctctgcttccaaaccgagacgtttaaccgcctcggcagctcctttgaggttgatatcggaaactgcgaccacctttgccccctgtaacacatagctacagcggcggatatgttcctggccaatggctccagtaccaatcacccctaatttcagcgtcatctttattctcctgtaaaacatgaatttttagcttcaaatgtttaagccgcccctaatcagcgtcacatcatttacctgggcacggcacctgactgtggtacacagcatccaccttaacgccaagtggaatttattttccataaaacaataatacaaaaaatatgttttattctgggaggcggatcaaatcttggaagttaattttttcaggaagtcgataaattggcagcgcgatgaacggaaagagcgttttatttaatttaaatcaatatcttagaattaaagcagtagagtgataaatgagagaccttagttttgtgatctcggtaacagtataggaggtagctcaagacaatgctgattacggttgacccgcctcgccacgattctttttatgagccagatctaaaaattaaagtttcataattaacttaatatgaaataaatgttttcatgaatttatcgttgtcagagactgaaaccttttacctttcgctgacaatgactgtcgcatcattggtcgattttcttgcagtggcacaatgacattaccaacccacaagtattcagtacgacgctggttgtcttgaataggcgaattacaacatcctcgcggaaaatgaggcaggagtctcggtatgggtattgatctaaataggttttgcgttaatcgtaaaattgcacccaatctaactatcgaacaattttttcagttaatggcgcgttgtggtctgaataaagttgaaatgcgtaatgatatgcccagtggaaaggtcaccgattccctctcggcactgcaggttaatgctttggcagaaaaataccgtcaggagatagtaacaatcaatgcggtatatccattcaatcagataaccagcaccttgctggagaaaacagaagggttgcttaaagaagcgagagctatcggtgctcaggcgttggtgctttgcccactcaatgacggtaatcctatttcactcgaagacaccgtcagcgccatgcaaaccctggcccccttattcgagaaatatggtatagccggtttagtggagccccttggctttgaaatgagctccctgcgttccgccgtgctaacacaaacgctgatccgagaagctcaggtgccattcaaaattgttttggataccttccatcactacttatacgtggaagatgaagtcaattttgagaccaaaatcgatatcagtctcatcggtctggtgcacgtatctggtgtagaggacgacagaagaaaagcgttgctgaccgatgaagaacgtctgatgcttagcgaacgagatttgatgaaaaatatcgagcaagtcttacgacttgaaagattaggctatcagggatttattcgtttgaacccttctcatcggtgcttgcgggctggagtgaagcggatattgaaagagaaattcgccagagtattgctctgctaacaccttaaaagatttaaagcatagtactccgccacgccttcatggctgccctcggtaaaacaggcgaccgtcattgggtcctcgctgtcgggaaaatgatagacagcgttgacgcaaaacggcccagctcccgagtgcccgatggcgcgaacaccgtcggctacgcggccactcatcaggccaagcgcgtagccacattcggtccaaggtcttccctcaatagcgcccccaaagggtaacgcatcagcatttgctctcgtgttgcagtcgacacgagtttgccgcaaaacagcgcatgcagaattgacgcggcgtcgctcgccgtgccgataaggcagccgtgatacacccagccgggatgataatgagcggcagccttccaatgcagtgtggcaaactgtgcctgagtcgtcgcgagctcaacgctgtgtagttcgagtggaagggagataaactcagcgacccaatgagcaaagggctttccagaaacggcttcaatatgctcgcgtgccagcatataacctacgttggagtaacaccagccgttgcccggtgtgaataacggaccttgggcaagtaccgcttcaagcagcctttcacgcggccagggcagctgattagcagcaacgtcgcgatgatattcggctatctgagcatagtcattaagcccagcggtatgcatgagcaactgacgcagcgtaaaggcctcacccgcgagcggtgcatctaaatcaatcacgcctgcttcagaaagctttaacgcacaaatagcgataaccgttttggtaaagctccagtaagggaaacgggcgttcggcaaagcgctggtttccctgcgcccgctcaagctaattgaacaccagttaaagattttgtccgccattcacttcctcttttaaaagggctttcgtccggaaagatatcggacgcctggcggcccgaaggtttccgaatggggttcattcggcagtagatgaaaaatttcacccactgcataggtcgtttccccgtctgcagggcgaaggctgatttcgccttcgaggattaaagccttgccaggctcgtcatgttgataaggcatattataacaaaacgagcataatttattttgttgtagataattaattaaatcgttctagactagcggcaaccccaatggaaaggaggcttgcatgtttaatttaaaggaagtcaaatcaacatttgaaagtgatacttataacttctcctcaagacttaagcattatattaacagttcaattgaagacgttaatggggatatcgataacgacatcgacgctattttatatgacgcctatgaaacgtcgttacccgaagcacaaaaggttattcacaacgcattatttatgatttaccagataaacctgtgctatcccctatcaataccggctcagcggcagtatgaccctataattattaatataaagaataagattgaggcccgctggctttatcacgagtttaaagatacgccaaacctcgaggtaccggctaaaaataaaagtttcgctgagttcttgataaacctatggaaaacgcataacgcctcacatcaccccctgttcgactttatcgagactgatgcaacacaggaacagctttaccttttcctcaagagtgacagtgcattaaatctaattttcttcgaccttgtcgcctatacgctgattggatctcaccctgagacccgaggaaccataagcgaaaatatatgggatgaagtggggcatggcgatcgttatttcacccatgtaaatctgtataaagacctgctcgaaagacgaggcataaatttacccacccatcactatgtcgaactttatggcgcggaggcactgtccggacataatgcttttatgctgggcggggtaaatcgacgtcattattataaattactcggtgtcatggccatgacggaggttttggatcccccgcagtattcaaaattagtaaagggctgcacaaggttggggctcacggaacgagacttccactattacgccgagcatattgaagtcgatatcaaacatggtgatgactggctttataacgtgatcaacgtcattgtcagccagcatcctgaatcaaagaatgaattttatctcggctgtctgctgcgtctgcgtaccgccgaacgttattacgaccagctgctggaggcaatgaagggcatccccgattgccagactattctggctccatccacgtcgatttaaaatcaaaccagccgagattgttaaggtgaatcccctgcgcctgttcaggccctttcaggcgcatccagtggtgaaacagcggctgtaaccaaccttcaccgactacattttgcaccaattgctgagaggtcagcgtctcttctcgccactgctgcaaccactggttgaaaatctcggcgttacccccagaaatgtgatcttttaacagcggcatgcccaacaaccatgctcctacgttccaggcttcgggaacggggaaattaactgtccccaaccacagatccgcttttacctctcccgttgcccagcgctcatactctatttcgatgagctcaagctcgacgcctgaatcggcaagaacatctctcatatcgcctgccaacatccgatattcaggatgctgagcgtgataagccaaccttaagcgacaaggcatctgcggtgcctgcgattttccggcatccatgcagtgaaaccatgaaggcaacaggcttccggtcggcacccagaattgtcgaatcggctctatcagtttctgtattaacaggttcggattgagtttttcgcgcagccagcgtcgtttttcaatgctctgccactggctcgagcgactgtcgcaaagcaaaaaatatcctccgcgctcaagaaacatctcgcttgaaaggtcagacggtttccccgtgaaattcaccgcatgaccggcgacataatccacgtcactaatgcttgagctcagccaggcggcagactgcgcgggcacagcgttaaccgctgtcgaattggtggctttatcgcctaatgacagcgtagcgagatctggccacatcaatacttccacctcatcaagcagcgcccgaaacccgaagtagcggtcataggcctttagaagcagacgccagtcgttattttcactcacctgatacggcccggtcccaatgggatgtgcggcaaaatcagcacgcaacgcatggtcggcgggcaaaatcagcgccgtcggatgagacaataaaagcggaagttgcggatcctcctgactgagctcaaccaccacacttagtgtaccgctctggtagacccgctgaatatgagagaaaagaggctgctgcgcacagcgagtcaacgactcaacgacatcctggctggccagctcacgtccgtcgtgaaacaacacgcccggccgcaaatagaatcgccaatgtcgctcgtcaacctgccgccattggtgtgcgaggtcaggctcaagcgcgccagtatcctcattgatgcgggtgagcccgttgaaaatttgccgcaccagatgcacttcggaacgacgcagcggcgttccagggtaaagattcggcatagtgcgataatagggtatgctaagggactgatagtcattgcgaatgctatagcccagcttgctacgaagcagcgaagtcaccagttgcttttcttcgccaagcagacttattgcctcgtcaaaactgccctcgcctatgagcttatcagccttttcaaccagcagctgatgggcatttctcagcagagtcaaccgcgaccgatgccccgccctgcaaccgatagccagtcaacccaacctaatgtctgcatctgcaccaacaggctacgcatgtgccttttactacagtgcagtttatccgctaactcctgcagggtggtactgccgctctgtgccgggaaaacgtccagcaggcgcagatattgttgttcaagccgacgactggccataaaagaggaactccagagcataaaatgcagcagtttttaatctcacctttttaggccattatttccaaaaccgcaacggctgatggttaaagcaaaggttccatcccgtttgataacagaaatatttatcttaaggcgttcgttatgactaaacatttaaacaaagacaccactatttgcatgtcactggccgccagaccgagtaattttggcacccgttttcataactatctctacgatgcgatggatctcgattatttgtataaggcctttactacccgggatttgaaagcagccattggcggcgttcgcgcattgggcattcgtggttgtgctatctcaatgccgttcaaagaggaatgtattccgatgctcgacgagctagatgcttccgcaaaagccatcaactcggtcaataccattgttaataacgacggctatctcaaagcctataacaccgactacatcgccatagctaccctgctgaagcaatatcaggtccccaccgactttacctttgccctgcgcggcagcggcggcatggctaaagcggtggcctgcgcactcaaagatgctggattcaacaaaggggtgattgttgccaaaaatgaaaaaaccggccctgaattagccagtctttatggctttgaatggcgcaaagagatgggaaatctcaacgcggatctgctgatcaacgcaacgccaatcggtatggcaaatggcgaagacgccaacaaactttcgtttaccgagcagcagattgaacaggcacaagtcatctttgaggtcgttgctctccctgcagaaacgccgttgctcacctatgcaaaaagcaagaataaggccgtcattactggcgctgaagtttttgcgattcaagccgttgagcaatttgttctctataccggcgtcaggcccgacgatgagctgtttcagcaggctgcacattacgcacgcgccggagcctaaacacagcatcacacctcagtcttttatataaaaaaaacctatcgatactcgttatccgatgacataaaaatagaaggcgtaccctatgaataatggcatttataaacatctcatgaccggcgtttcgcatatgcttcctctggttgtcgccggaggactgtgcatagctctctcttttgtttttggtattcaagcatttaaggaacccggcacgctcgctgccgccctgatggacatcggcggtaaagccgcctttgccctgatggtgccggtattggcaggatacatcgccttttctattgccgatcgccccgggctcgcgccaggtttaataggcggcatgctggcaagcttaggaggcgcaggatttctgggggcattgttgccggttttcttgccggctataccgctaaattcctgattgagaaaatcaggctccctgcggagatcgacgcgctaaagcccgttttagtcgtcccattgctggcaacgttgttcaccggacttgtcatgatttatgtggttggcggacccgttgccgccgccatgagcgccctcaccacgttccttgccagtatgaccacggccaacgccgtactgttgggcatattactcggcgcgatgcagtgcttcgacctcggagggcctgttaacaaagccgcctatacttttggcgtcggcctgcttgcatcgcagacctatggtccgatggccgccattatggcagcaggcatggtgccggcattgggaatgggcgttgcgacctggcttgcaaaatccaaatttacccagtctgaacgtgaagccggaaaggcatcatttgtcctcgggctgtgctttatctccgaaggcgcaatcccctttgcggctcgcgaccctatgcgagttatcccctccaccatgaccggcggtgccttggcaggtggcctgtcgatgttctttggctgcactttgatggctccacacggcggactttttgttctcgcgatcccccatgccgtgggccacgtcggcatgtatctgctttctattattgctggaacaatagtcaccggcgtgatgtattcggtattaaaaccgtcaagcgttgatgttaaggaagaggaagctacagcggaagggagttccgcttttaaataataaaagcaagcccagactgaccgtgaaaaaagtgagttatgggcttctttgaaaggtcatcctcgaaataataacaatgattaatcctctctcactcaggcaatgaaaatagccctaacaattcctcttcaatccggcaatgtgaaggatcctcccgctaaattattgggttgtgcctgctcatcaatctgttcttactttataaaagtagctgaatcgatttcatcatgaaaaatttcagcccactcacttcacagtgttgaatgcaaagaattataaaaaacatttaatattgtgatgagaatcctaattcagacagctttcgatcataattaacgtccaagtgataatcctcacgtttttaactcctctaactttgtagtctgcggttggttcaagctaaatcaattcagctaaagggaatgagtgatgaaaaaacatattctggcaggcgtcgttttggcattaatcagtggacaagtcgcggcaaagacgtgggtgctgaccgatgctgacagcagtacggaacagggaaattggcaaataagcagcgcgcagctgaagttagaaggtgagcccttcagcatcgaacaaaaagtgcttcacggcgggaaacaagagggatcaaaggtcatcaccgtaaccagcaaagatgggctcactatcctgcttagcccgacacgcggcatggacttgctccgtgtcaccggacatggcatccgtttaggctgggattcgccggtaaatgaggtcgttaatccggcctatatcaatcttgagagtcgaaacgggttaggatggctggaaggtttcaacgagatgatggtgcgctgtggctacgaatggaccgggcaccccgtcactaaagatggcgttatttatacgcttcacggtaaagccggtaatacgccagcgtcaaaagttgaggtcattgttgatgatcaagcaccacacgagatccgcattcgtggtttattaaaagaacatacttttaagaaagccaacctcgagacatggactgaactgcgctacgtgccgggcagcgactcattcactatccatgatgtgctgacgaataaagctgattatccgcatgattatcaaataatttatcacagcaatttcagcacgcctatcctcgaagaaaacgcacgctttatcgcgccactcgaatcagtctcaccgtttaatgactacgccaaaaaaggcttaaataactgggcaacctatggcgcaccaaccaaagacttcgacgagatggtatttaatctcaagcctaaggcagacagcaacggtaaaaccgtcgcggccgtcattaacagcaagggagacaaaggtgcatcaatcgagtttgatacccatcaattgcctctgctaacgatgtggaaaaataccgatacgctgaagcagggatacgttactggtatcgaaccaggcactaactacgcttatcctgtcaccgttgagaaacaacaaggccgagttaagcagcttcagccgggccaaacggcagaatttaccctgacctattccctgttaaaagatgctgcggcggtacaaaaagtcgagcaacgggttaaaacgttgcagggcaatgaacccgcgaagattgatgagaaaccgatcgccgtagaataacggcggtaagagataaaatcagaagccacatgaggtaatccgtgtggcttctgaggaggctaatacgcagacttattgacgaatcctttaaatatgctcagacatattattttcaagtccaggctcaggctccagttgtggatataatcaagatcaaaatcgacccttttttgcattttatccaaagtatttgtttcacctctccagccgttgatttgagcccagccggttattccaggtttcattttatggcgtagcatatagcctgatatcatttttcgataaagttcgttatgggcaattgcatgcggacgaggtccaacaatcgacatacttccctcaagaacatttataaactgtggtaattcatcgagtgaagttttacgtagaaaactgccaagggggttatacggctatcaccctttttagcctgaatgacatcatcaccattttccataacggccatgcttctaaacttccataccgcaattccccgcccatcaataccatatctctgctgtttaaagatgataggcccaggagaagttactttcactaatatggcgataagtatgaagataggtgatataaacgttaaaatggctaaggatagaatgatgtcctcaagtcttttgataagtttgttcataccaatcattggagtatcgacaagggaaacaacgggcacaccatcaatttcctctgtgcgcgaatgaagtaaatcaaacatgaaaatatctggaataagtacgacggtacaggttgaatcagcaagctcttcgaccacatctctaattatcttctcttgagtcatgggtaatgcaatataaacacggtcgattttacctagcttggcatcaatgattaattgttcaaatcccctcgctttggaatagttgtatctaatgtcgtctcgctgtcatcataaacacctaagacattaaaccccatccattgggcatcacgtaaagactccgcgagcttaagacctaccggcatagcgcccataatagccacattacgcgtgttatagcctttattacgaagatagccgatgacgagccttataattaccctcgatacaacaagcccaagatataccgtaaggaaccataccgaaaaaatgacaaagttttcatattccgcattgagaatggataaaaaaccaaaggtcattaaaatggttaaaatccagctctttattacaatcttaagttcataactcagcctaactccacgccatgaacgataaaagtcagtaaagctgccaatcatctggaaagcaataattgacgccaggactctgttaagatcttgatacatgaacttttcgtcaaacagcaggcgtgtaagatacagtccagagaaaatggtcaacacatccgagacaatttgtatgagcgatgtgaccggtgcactataatggaattttctccgtcggaaactcgtcatatcattccttttgaagatcatggatacatgtacctacaagtatgactgcgtctaattcaattctaggttgggcataaagaaatgttgcccacactaaaataaaaattaactatttataatacagaatatttttaaagcgctcgctgaaacacagtgtcttccgtaacgcattgactcataaacgttaagtcataaaaatagttcatttttgaacaaagtgccactctgattttatagaaactttacttacctgacgccaagagtaggaaaaaatcaagtaagctcaagcggtcacaccaaagcttaattcggttttttaattataaaaatcagaatgatacagaataaccttccgttgaggtgtgaaagagcacacatttagagattttatcgaaatggcatttcagaaaggaaaaaaccggccaacatgaggtattaaacgggtttcaaacctcagttgtcccggtttataacgcgatttattcgcttcagagtttaatttttttgctgcttggcggaagaatatcgctgactgagcaatcatcgcgatatacctcaagcaataaagcctggttaagctgggagttgaaactctcagagggattggttgcagccgtctgcctgacgtccagggcagcctctaacataatattaaattcagcatagtgactaaacgtattttcggagcatcccactatagcggcgcactcagaagaggtcagcttaggatgactggctttaactcgtctggcgaaatacgcgtcgcattcccccggcacgcgcggcacctccattccggctttgacagcgttgtccgacatccctataaatactttcatccgtctcagattatagggatcggtgccggataacgatgaacattctaaaatcgtaagatgcggatgggctaactttatccgccgtgcataagcactcatgttctcgtcatctgtttttggacaagccattctcgcggcctgcgctgtcggagataactccctcaactcgggagtatttcgcaactcacgtaaactgagacctgaaatgcagcttaaatcccttttacgtaaaccgctaaagttcttagtcagacgcaccgcataatctcgggaagattcatcactgcttttctttatggcatcaattgccgcttgagcagaggacgacaaggtcagaaattcaggcatcgttcgcatacgacgttcctgtacacctgataagcgacacaggtctttaacggtaagttcggggtcgggaaaaatacttctcaggcggcttacatactcatggtcactctcgtcaggctctcgcggcattagccattgtgcggcagcgccagactcggttagctcattgaatacaggaagatgccatagttcgcacgccctgacgcccacaatttttgccgtattgctcatgcttaagtttggataaaacattttaatacgaagcgcgtaactgactttgttttcactgaaattacgcttggtgcttaacggtaacccataaaattcggccgtagagggcagtaagtcgtttcccttttgtctctcttggcaatccgtttcaggatactcaaaaaatgagttaggcctggtggcactttgggaaatgttagcgatattcggtggaggagtaagataatgggttgatgattcaagcggctcggcgacccatgtaaatctcgccaaagggaggtgagtagaaacactgagcggaatatcactcattagactctccctgtgagagggagcaaaaatttataattaaaatcaatgatttgcgtaacttccctgctcgatttagcagactcaaaaactttatgtcatccataacatcgctccaattttcggatgacgatagcacaaataaaaggggctaaaatgcaaaaaacgacgttaatgacggctaataaaatatttttatttttcctgtaagtcaccctcgggaagttaaatcagggtacgaagaacttaagagaaataaattaaaaaaaaccagtgttacgccaagcgcttcaccggtttattatttcaaaggtttttaaatcaaggccttaccaaatcatccccatagccgatccacttataggtggtcagcgcctcgaggcccatagggccacgcgcgtggagtttttgagtgcttaccgccacctctgcgccaagaccgaactgaccaccgtctgtgaagcgggtgctggcattgacgtagacggccgaggagtcaacttcattgacgaagcgttctgcactgctgattgagcgggtcaggatggcatcggaatgctcggtgccgtactggcgaatatgcgccacggcggcgtcaagactggctaccacggtgacattgagatccagagacagccattcgtcctggtagtcttcttcctttacatcaacgactctggcaggaccgtctttcaggtgcggtaacgcggagctgctggcgtgcagtgtcacgcccgcaaagtgcattttctcgctcagcgcaggcaggaatcggctggcgatcgcctcgtgcaccagcagggtctcaagactattacaggcgcttgggcgctgaactttcgcgctctcaatcacggtcaaggctttctcgaaatcaacgctttcgtccacgaaggtatggcacacgccaatcccgccggtgatcactggaatggtagactgctcgcgacacagcttgtgcagcgccgcgcccccgcgtggaatgagcatgtcgatatacttgtcgaggcgcagcatctcggcaaccagcgcgcggtccgggctttgaatagcctgaacggacgcagcaggcagtccgcactcttcgagcgctttctgaatcacgttaacggtcgccagattggtgtgatgcgtctctttaccgccgcgcaaaatcacagcattgccggttttaagacacaggctagcaacatcgatggttacgttaggacgcgcttcgtaaatcaccccgacaacgccgagcgggacgcggcgacgttgcagttttaagccgctgtccatttgtgcgccgtcaatgacctgtccgaccgggtcactcagtcggcagacgtcgcgcacgtcgttggcaatggcggtcagacgcgctggcgtcagcagcagtcggtcgagcagcgactctttcatgccgctttcacgcgcggccgccatgtcgagttcgttagcctgaataatgctctggctgttggcctcaagcatgtcggcaatcagcatcagcgccgcgttcttctgcgcagtactcaatgtagaaagctggtaggaagcctgtctggcggccttacccatttgctccaacataataactccttaacttacgatcatatcgtcgcggtgaacggcaacaggaccgtactcatatccgaggatatcgcttatctgctgagagtgatgaccggcaatcatacgcattgcatcactgttatagcggctcacgccgtgcgccaggtcacgtcccgacaggttgcggatgcggatcacttcgccgcgcgagaagtcacccttcacgtcgcggatgccttttggcagcagtgagcttccacgttccagcatggcggcaacggcaccgtcgtcgacggtgatttcacccgcaggggcgcaccgaagatccagcgtttacggttctccagcggggtttccatcgcgtggaaacgggtaccgacagagtgaccggcaatcacgtcaccgaccacgcccggcaggctgccagcggcgatgatggtatcgatgcccgcacggcaggcgatgtcggcagcctgaagcttggttgccatgccgccagtgccgagtccggaaacgctgtcgccggcgataccacgcagggcgtcgtcaattcccctcacctcgcggataagctctgcgtcagggttggtgcgcggatcggcggtaaacaggccgggctgatcggtcagcaacagcagtttatctgcacccgcgagaatagcggccagtgcagaaagattgtcgttatcgcctactttaatctcggcggtggcaacggcgtcattctcgttgatcaccggtacgatatgattatcgagcagcgcattcatggtgtcgcgggcattcagaaaacgctcgcgatcttcgagatcggcacgggtcagcagcatctgcccgatgtggatcccatagatcgagaacagctgttcccacagttggatcaaacggctttgacctaccgccgccagcagctgcttggaggcgatggtggcggggagttcggggtagccaaggtgctcgcgtccggctgcaatcgcgccagaggtgacgataacaatacgatgccctgccgcgtgttgctgagcgcactggcgcaccagttcaacaatgtgggcacggttaaggcggcgtgagccaccggtgagcacgctggtgcccagttttacaaccaacgtttggctgccactcataatctttctgccatttgtcttgaattaaagaatcgaaaggacgtatgccgtcactatgctgtctttttaacagttggggcgcgttatgccaactgacataacgctaaataatgacatacaaattggatagagcgaaatccagctttatgcgggaagcttgatggggtctttggggagttcttctgcgggttcgagcttgagttccatttccacaatcatcgcgttcaggttcttataaaaatcctgcagcgtggtttcaagcttctccatcacttcagtatttttaatctgttgagctttccaattaccatccttgtcgaataggccatattcgtaaacataggtaaaacggtcgctttcagcctgcagctcaatccaccatccccagaattcacgtttctcgggtgctggcttcacgttaacgcaaactgccagacaatcgaagaagaaacgctcgttctcgcatttcgcttcgcggatataagggcctaacgtgccgaaacgtttcatcagtctgcttttaggatgaccacttggtaacgtcatgtacaacctccttatgtagacccacatttgtagcaaaccgttaagaattagcaatctatttgttattcaatttttagtttcaaccactggcaaatatcttttagcgccttgtcatagccgccatacagcggctttgaggggatagcaataaccttgccgtcggggctggaatccgctatcagcctcgattcttctttcggactgaagggatcgttgtcccaataacaggacagcatcggcaccggcgttcgtcggcccagcagtccctgcattttcagagaataccgattcagctccaccttgagcgccgcgtcactggcgtaatgcatgccgatgcggctcgccagcacgtccatatacatatcggggatacgtttttggcaggcgctgtcggtgagcatctgatggacgataggcccaagacaggcaaccgccttgatgcggcgtggctcaagataagcaagccgcacggccacgttgccgccgaaacgaataccaaagacggcgatgcgcgtcgcgttcacccacggaattttatccagccgagtcagcacctgctgatgtaacgcgctggtgtcctgcgtcagtttggcgtgcgccgagaatccgaccgatggcatgtcgatagtaatcattgcgataccgagcggtgccaggtagctgcggaacaggcggtgataatcgctctgtaaggcatccagcccaccgcaaaccagtacggcgggaaagggggcttcaccctgattcggcaaatgaacaaatccgacgataggcttagtcccttcaaccggcagagaaaactctttcagtttatagctcgaccctcggcagattgctcgaaggccttattgcccaagacctcggcctgctcggcgagtgcatcacctttaatgtgcggataaccggcaatgctgtaaaagttggcggcctttagccaatactcgctggccttttcggcgtgcggctcttcctgtgctttcttctgccaaaacattgcctgattcgaccactcgtagatccagttgccgccgcgataaccgaccacggtatcgagcagctgggcgtcggttcgctcggcggtcgaaacggcaatgcgggacaagacctcttcaacctcaaggggatcaataccgcgccacagccacatcaggcggttaattatcctgtaccagcaaggtgccgagtctccttcgagcgcagaataaacagtgggcgaggaatgacgatcggatcgcgcgaccagcgtggaagtctcaggatatttaaatcttggtttgaacagtttttcagaaagattcgtgggcgccataacagttaacttcctcttttggcagatgagaaggcgcgggcgcaccctccccagcctcggattataacaaagtctggcgaagtcgtatcaggacctaaatcaaaaacgcccgcagaggcgggcgtttggcgcgattaagattctcccgcttaacggggattacttacctgcgataggtggaacgaagacgacgcccatatcccatggctgttcgatccaggtgttttgtgggatatctaccacataatcatcaaccagcggacgaccagccggttttgcgaacacggtgacgaaatgagctttgggatacatttcacggatagcctgcgcggtaccccggtatcaaccagatcgtcaattacgataaagccttcgccatcgccttctgcacgcttaaggacgtgcatttcacgctgattgtcgtggtcatagctggagatgcacacggtatcaacgtgacggatgtttaactcacgagccagcaacgctgctggaaccaggccaccacggctaacggcaataatgccggtccattgttctaccggcagcaggcgcttagccaacgtgcgggcgtgaatttgcagcatgtcccaagttacaacgtacttttcgctcattttttaactctcaagatagggatcccagcctttaagattaacggcttttaaaaaatttattcagggaaaaattgttgcgcgagattatagtgagtcctgcggctaaaaaccagcggttatcccgtacgcgaaggccaaaattagcgaattatcccctttgcctatcgcgcacagcgccggagaaagtgctattctgtcggccatctcgtcacatcttttgaccatccaaaaccgggagactcacagtgtctgaactgtctcaactttctccacaaccgttgtgggatatttttgctaaagtttgctctattcctcatccttcttatcatgaagaagagctggcaaaacacattgtagactgggccgccgaacaaggtatccatgcagagcgcgaccaggtaggcaatatcctgctgcgcaagcccgcaacggcaggcatggaaaaccgtaaaccagttgtgctgcaagcgcaccttgacatggttccacaaaaaaacaacgacaccgttcatgacttcctgaaagatcctattcagccctacgttgataacggctgggttaaagcacgcggcaccacgctgggagccgataacggcatcggtctggcgtctgctctggcagcactggttgataaaagcgttgagcacggcccgctggaagtgctgctgaccatgaccgaagaagccggtatggatggcgcatttggactccagccaaactggctgcaggctgaaattctgatcaacaccgactcggaaaccgagggtgagatctacatgggttgcgccgggggtatcgactttatcaccaccctgcctctgcaacgtgaagcggtaccggcgggtttcactccgttgaagctgacgctgaaaggcctgaaaggcggccactccggtgctgaaattcacctgggtctgggcaacgctaacaagctgctggcccgtttcctgtgcgaacatgccgagaaactgaacgtacgtctgctggacttcaccggcggcacgctgcgtaacgccatcccgcgcgaagctatcgcgcagttggccgttcctgccgacaaggtcgaagcgttcaaagctgccgctgatgaattcctggcaaccgtacagtttgaactggcggccgttgagaaaaacatcaagctgttggttgaagacttcgcaaccagcacccaagcgctgaataaagacagccagagccgtttcctgggcctgctgaacgcgacgccaaacggcgtgatccgcatgagcgatgacgtaaaaggcgtagttgaaacctccctcaacgttggcgttgttacgatgaaagaaggcgaagcagaaatcatctgcctaattcgttctcttatcgatagcggtaaagactacgtggtgagcatgctgacttccgtaggccagctggcgggcgcaatcaccaagccgaaaggcggctatccaggctggaaacccgatccggaatcaccggtgatggcgcaggttcgcgaaatctatcagggtctgttcaataaaacccgaacatcatggttatccacgcaggcctggaatgtggtctgttcaagaagccttatccggagatggatatggtctcgattgggccgaccattaccggacctcactcaccggatgagcaagtgcacatcggcagcgttgacctgtattggcagctgttgacggcgctgctgaaggcaattccagaacgcggttaatttctaaaatgcgtcaatccccattagatttcaggcagcaagtgcgttggctgcgtgaaggatgatggggatttttattcccagggtaataaaagctgccgttctatttgcggatcctgtagcgtgacgtgcagtccgaccagcctgacgcctcgccctccccgacgcatttcccaggcttctctcgccaccttgagcaaatcatctttattgagtatcggccagacatgctcctgcgtcgtttgctgaaaatcatggaatttgagtttaacgccctgacgcgcgatacgcagactggggctcacgcgggtcaaacgcgtctcaagctcgggatataaacgctcaatcagcgccacacagctttcccagtcgtgaatatcttccgccagtgtacgttcgacgccgaccgatttacgcaggcgctcagctgaaatctcacgttcgtcgattccctgacagcgctcccaaagtacccgaccaaacttgccaaaccttttcagcaacagcgccacatcatagcgctgtacatccccacaggtgataagcccctgctcttcgagtttggccgccgtgactttcccaacgccaggaattttagccagcggcagatcttgcaaaaaatcggccaccttgtccggcgtgatgacgaactgtccgttgggcttgttcagatcagaggcgattttcgctaaaaatttgatgggcgcaatacccgccgacgcggtgagattaagctcgtcggaaatggcctggcggatctcgctggcaatcagcgtcgccgagccgctacagtgcgggctgttggtgacgtcgagataggcttcgtcgagagaaagcggttcaatcagcggagtataacgagagaaaatctgccgaatatgccgcgacgcttctttataggcttctcccctgccgggaatgactttcagatgcggacacagcttgagtgccatcgcggtggacatagcactgtgtacgccgtagcgtcgcgccggatagttcgcggtgcttatcaccccacgccgctctttactgccgccgatggccagcgggatatcgcgcagtgagggatcgtcgcgcatttcaacggcggcgaaaaagcagtccatgtcgacgtgaatgatcttgcgcatagccccctccgctttctaataactgtataagtatacagtgagctttccaaatctcaagccttcaccgcgggctattaatcgctttaatttagcttaatttgtgggagttttgtaaaaagctgcaaataaaggctttttttagcccgttatagaaataaattacatttcttaccattgataaaaaattaatcagtattaagatggctgcgttcaaggttagtgaatatcagtggcagtccgcgacgtctggtttgcggataataaataatagagttgtatataaagcaggattaagaatggtcagaatcgcgctgctgcttgcgatgcttttcagtttgcccttttttgccgtgagcaccgctgtcgccagcgaacaggtcccggttgagagtggtgttaaacagcaattattaggttcacccgtttatattcagatatttaagcaagagcgtactctcgaactctatgccaaagtcgaagataaattccagctagtgggtgcgtatcgcatttgtgatttttcaggtggattaggcaacaaacgtcgtgaaggcgattttaaaagcccagaaggtttttataacatcgatattcatcacttgaagccagacagccgtttctatcgcgctattaatatcggcttcccgaatgattatgaccgcgctcagggttattcaggtaaatatctgatgatccacggtaactgtctttctatcggctgctatgcaatgaccgatgcctacatgaatgtgatttataactacgttcaggcggcgttcgacaatggtcagcgcaacgttgaaattagcatctacccgttcaagatgaccgactccaacatgcagttgcacagaggctcttactacatcaatttctggcgtcagctgcagcctggctatgcctacttccagaaataccaccagccgccgagcgtttcagtgatcaacggcaattacgtggttaatcagtcacaggccttgacgccacagccttcacagctggcgttcgccacagtgaaataatgcaaactcgcctggagcaatcttgttccaggtttcattgcccgtcagcggctgggtagcaatgaccgtgacaacatcatccggcgtcgtctgctgctgaaaatcaatttccacgtcctgatccaacagtgtcgccttgccaaaggggcacgacgggttatccagtgaagattggtcgagcagtacgccatcacaaaatgcccatccgacaacagcatattaaacacgcccttctgacgtagctcatccgccagtgaggcaatatagcgaaacaccgacggccaactgcgcggcgtgcgcggataacgttgggttaatttgtgcagcagccagcagaatgcgtattcgctgtcggtttgtccgaccgggcgcaaggtgccggtgtctagctggcgataacctcgcagctggccgttgtgcgcataagtccagttacggccccatagctcgcgggtaaacggatgggtgttttccagtgaaacttcaccgcgattagcctgacggatatgcgagatgacagccagagacttgatcgggtattcctgcaccaggcgggcaatgggcgaattaaagctgggctgtggatctttaaaagttcggcagccgttaccttcataaaaggtaataccccagccgtctttatgtggaccagtaagcccccacgctgcaccaacccggtaaagctgaagcaaatatcggtagggacatttgcactcatcccgagcagttcgcacatcgccagtctccttaactttcacattggaataataaaacctgcctgagcaagcttattattccgccatctctttttcgattaataatatcaggatatggatgattttgatgtgaatttcctgcacgcgatcggcgtaaccgaagtgtggaacgcggatttcaacatcggcacccagtgacgccattttaccgccgtctttgccggtgagggtaatcactttcatgcctttggctttcgcggtttccagcgccttgatgacgttaccggaattacctgaagtagagatgcccagcagcacgtcgcctttttggcctacggcttcaagatagcgggagaagatgtattcataaccgaaatcgttgctgacacaggagatgtgactgacgtcggaaatggcgatcgctggatagccgggacgattgtcgcgataacgaccggtcagctcttcggcgaagtgcatcgcgtcgcagtgtgagccgccgttgccgcaggacagcactttgccaccggccttgaaggagtcagcaatcaattttgcagcgcgctgaatagacgcaatgttgttctcgtcgctgatgaatttattaagaacttcagcagcttcgttaagttcagtacgaatgatatccaggtacatggcagcctcttatcgtttctgttgccgcgggttaaccgagcattgaattgttttgccgtgcagtgtagcggaaagccgaaaaagcgagaagtcttccagccgtcccaaataagatactttacgcttttgacacatcgtgctgcgactttgtgacgtaagttgtaattaggatgtaaacgcgttgataaagcctttcgcttggactaaaaccatagtatccactcaacaggtcagacctcctacaactcaggagttttactatgatggttcttagcattgttgccctactggttcttattggagccttgttttatcaccgcatcaacctgccggcgagcagcgctattctgctggtctacactgccgcaatggcctttttaggcctgtggacccttggctcctgctgccgctggtgattattttgctgcctttgaatgtgctgccgctgcgccgcgccctgttctcacgcgctgcgctgcgcagtttccgtaaggtcatgccgagcatgtcgcgcacagagaaggaagcgattgaggccggtacaacctggtgggaaggcgatttgttcagcggcacgcccgactggaagaaattgcatgattatcctcagcaaacgctgaccgaagaagaacaacgcttcattgacggcccggttgaggaagcttgccgcatggcaaatgacttccagattactcacgagctggcagacttgccgcccgaactgtgggcctatctgaaagagcatcgcttcttcgcgatgatcattaaaaaagagtacggcggcctcgagttttcagcctacgctcaggcgcgtgtgctgcaaaaactggcgggcgtttccggcattctggctatcaccgtgggtgtccctaactccctcggcccaggcgaactgctgcaacactacggcaccgacgagcagaaaaatcactatctgcctcgcctggccaaaggtcttgaaataccttgcttcgcattgaccagccctgaggcagggtcagatgctggcgctatcccagatttcggcgtggtgtgcatgggcgaatggcagggtaaacaggttctcggtatgaaactgacctggaacaaacgctatatcaccttggcacctatcgctacggtgctggggctggccttcaaactgaaagaccctgaccatctgctgggcgacgtcgaggaacttggcattacctgtgcgctgattccgaccgatactcaaggggtagaaattggccatcgccacttcccgctgaatattccgttccagaacggtcctacccgcggtaacggtattttcgtgccgatcgattacattattggcgggccaaaaatggccggtcagggctggcgtatgctggttgaatgtctgtcggtcggtcgcggtattaccttgccgtccaactctaccggtagcctgaaatcactggctgttgccaccggtgcctacgcctacattcgccgtcagttcaaactgccgattggtaaaatggaaggtattgaggagccactggcccgcatcgccggtaacgcctatgtgatggacgccgccgcaacgctgattactaacggtattatgctcggggaaaaacccgccgtgctgtcggctattgtgaaataccactgtacccatcgcggtcagcgcgcggtaatggacgccatggatatcaccggcggtaaaggtattatgctcggtaacagtaactttgttgcccgctcgtatcaggggctccaatagccattaccgttgagggcgcaaacatcctcacccgcagtatgataatctttggacaaggcgcaattcgctgccatccttacgtgctcaaagagatggctgcggccgagagcaacgacctcaacgcctttgaccgtgcgctgtttggtcatattggacacgtcggcagcaataaggtgcgcagcctgtggctgggactgacgcatggccgcaccagccgtgcgccggtgaacgatgcgacacgtcgctattaccagcatatcaatcgattgagtgccaacctggcgctgctttccgatatctcgatgggcgtgctcggcggcagtctgaaacgccgtgaacgtatctcggcacgccttggcgatatccttagccagctttatctggcaacggcgacgctaaaacgttatgacgaagagggccgcatcgaggctgacctgccgctggtacattggggcgtgcaagactgtctaaatcaggctgaaacggccatcgccgatctgctgcgcaacttcccgaacggctttattgcggcggtgatgacgatgattattttcccacttggccgcgtgcatcgtgcaccgtctgacctgcttgaccaccagctggcgcgcattcttcaggtaccgtctgcgacccgtagccgtatcgcgcggggtcaatatctgaccccaagcgagcataacccggtgggtcagatggagcaggcattggccgatattatcgccgccgaaccggtacataaaagactgtgtgatgcgatgggtaaaaaactgtcgtttacccgtctggacaagctggcacaaatggggatggacgccggtcatttgagcgccgatgacgcccgcattctggctcgcgccgaggaaagccgcctgcgctcgattaacgtcgacgagtttgaggccgaccagctggcacagcaaaaacctgagaaaaaagaacaggaaaagccgtcaactcaacatattgaagcggcttgacctcccctcttgatccgagcacagtgacgtcactgactcaggcttgcgtgatgtaacataaaacttgctggaaaggccgctgaccggacccgcacaaaaaaaccgccatcaggcggtttttttgtgggcggtattctcaggaaaaaatcagagaacaatcagcctttcttcggacgcacacgcatggtcaggcctttcaggaagtagcgcagaacctgatcgccgcacgggcggtaattcttgtggccttccttacggaagaacgcgctcagctcaccttcagacactttgaaatctgcggccgcaagaatggcctgcaaatcttcagttttcagctcaaaggcaacgcgcagctttttcagcatcacgttgttggtgacgcgcttttcaacttccggagcggggaagcgatcgtctttaccacgtttgaagaaaatcagaccgttcaggaagtttgccatcacttcatcagggcaaaccatatagtccgcttcgtcttcttttttcagataacgcgacatcaccgctggagtaatgatggttccggtagacgccaaaatctcaatcagcctgccttcgctcagatcgagcatgtagcgaacgctgcgcaagacatcgttattcatcataattctgtattcccgtgtgggttagttggtaaaccgaggaactgcactgggtttacccgctggcacctcgtagccgggcattatacaagtctgcggcgcaagtgccccttctttctgatgacttatttgacacgccgcgcaccctgaaggggttcgcggcgtttttaggcgaaacagagaggaaaatctagccgttttggcgaatgcgggcgattagcgcttcgatatcgttaatctgcggtgcggtgatgatcaaccattggcccaggcttaccgcgtggcgctggcaatcatgacgcatctcgtcatcgcgaatgtttttgaggtcagcaatctgtgagaaaccaatagtgcgacgaataagctccgatccacagtaacctacggcgtcgtgccagatttgctgcaagaaatgctcggcataacccggtactttaaacgcgacgtcctgcgttttatcacgcgccaactgtaggaaacgttcggagaaactcaaccaaaggtcacgcagctcctgtaggcgttgctcacgtccgtcggcggcttcacgggtggcgaccagtcccggcaacgcacagtagttgagcagcagatttcccatcgcagagcctggatcaaagccgattgggccgtagaagccaaattcggcgtcgatgactttcagactgccttcggccacaaaaatcgaaccactgtgtacatcgccgtgcagcagggcttcggcattgctgaggaaccgctgcttgagcgaagccaccgcaagacgcaacgtcatgtcggcctgcaatgcatcaacctcaggcttgagggccggctcaaagcggttacgctcgtgttcgatataaggatcggtgaagaacagatcttcggttatcagacaaagctcagggttaaggaagcgaccgacttctgattttttcttctgggcatcctgataaagatctgaagtgtggaacagtgtctgagccagatattcacccagttggctggccgcctgaggatagtattttcccttcaccagctcgccgcgccagataagatggtcggagagatcttcctgaaccatgaccgccaactccgggtcatgatgcaggactttcacggtgtgctgtgggcagtattcagcgtgcacaatcagggtttctgcttctatacgcgagcggtcgatagtcagcggccaggattcacctacacagcgcacatagggcagcgcctgcttcacaatgacgcggctcacgcctgcggtatcgcgaattttgaacaccagattcaggttaccgtcaccgacctcttcggcgctgactaacgattgcgggtcttcaacgccaccaaactggcgggcgtactctacggcatctgcggcgctaaacgtgtaataacgtgacatcctaacctctcgtaatctttcttatacaacccgacttgttttattgtgaaactgaattctattgacccaaagcatatagccataaaagcatttagacgtctatacatccgaaacttatgttggcagaataagcagccagatgcaaccgcgcaacagggatttaaatcacaatgcagactcttaccaccaccagtttacgtatccgcaaaagtcagctgtggatattggaccagcaggccctgccgcagcgcgccgagtggcacctctgccgcagcgttgacgacctcgtggggcacatccacgccctgcgcgttcgcggtgcaccgctgattggtttatccgccagcctgctgcttgcccagctcgcagaagaaggcatgccggttgcggatctgcataaagcactgataacgctacgcgagtcacgcccgacggcggtaaatctgatgaataatctcgaccgcatgaaagtggcactggagcagcgctttcacgtcccggcgatggttcaggaagccgaaggtttggtcggtgaagaccgcgagctttgcagccggattgccaataatggcgcggcgctggtgacgcaaggtagccgtctgctgacccactgcaacaccgggggctagccactgcgggcgttggcacggcgctcggcgttatccaccgcgcacatcagcagggaaaggtgtcgcaggtatgggtcgatgaaacgcgtcctttattgcagggcggtcgactgacggcctgggaattgggcgagctcggcattccctataagctgatttgtgattcgatggcggccagcctgatggccaagcggcaggtcgatgccgtgtgggtcggcgccgaccgcattgcggccaacggcgacgtcgccaacaagattggcacctacagtctggcggtactggctcgctatcacggtattcctttctatgtcgccgcgccgcatacgacgcacgatccacactgtccgaacggcgatgccatccccatcgagcagcgcgcagccaaagaagtgactggcgtatcgggcagttttggcgacgtgcagtgggcaccggtcgatgctgacgtctataacccggcgtttgacgttacgcctgccgagcttatcagtgggtgggtgttggacagtggcgtggtgacgccggcacaggtggcagaagggatctttaaacgcaaatttgattaagcccggccaagattagggttgagagacaagagatgacaccttcccctgttgtctctcacccatttaggcggtgcgccagccgaaaatggccgtattactcccccattctcggataggcatcggctatcttgtcgccggtgaagtgcgccacccagccttcttgattgtcaaaaacgcgaatcgcggtaaacgacggtgaaccgcccatatcaaaccagtgacgcgtgttggcagggaccgaaatcaggtcattcttttcacagaggatttggaaaatcttgccgttgagatgcagacagaataacccgcgccctcgacaaagaagcgcacctcatcttcgccatgggtatgctcggacaggaatttgctgcgtaacgcttcgcgctgttcgtggtcagggcgcatgctgataacgtcccagctctgatagcctttctccgccaccagcttattgatttcgcgctgataggcctcgataacctgctccggctgcggattgctgccgagctcacggtcagcctgccagcgttcgaatcggacatcaatcttcttgagctcggcggcgatcgcctccccgtcgcggctttcccagataggggccgaagggtcgctgtcgctgaaaatggtcagtgcactcattgcaaactcctggtcagtggatcagtcaatcacaacctgatcaaaacggttaacctgcttgtggtcactctgctcgtctggctcatcgcgaatcagctggcacgtattccagcccgcttcgcgcgcagcgtccagctcctggcgaatgtctgataaaaagaggatatcctgcgccggcagcagcagctgttcggctatattctgataggacgtcacctcgcgcttggcccccacgcgagtgtcgaaatagtcggtgaacagcggcagaaggtcgccctcttcactgtagccaaacagcagcttttgcgcgtcgaccgagccagatgagtaaacaaacagcttgatgccctgctgctgccactgcaccagctgcggtacaacgtcgggataaacgtgccctcggaaatcccctgcggtataaccggtgcgccagataataccttgcagcgttttcagcgccggggatttctcgtccttgtccatgtagacgtagagctgatcgaccagttcgacgatttcagcctgcggttcattaatctcttcacgcagcgcatccaatgcctgcaatacttccaggtcttgcccatggcgggtgataaaatcggccaaccgggcacgagcataggggaacagcacctgatgcacgaagcggatgtcggtcgttgtcccttcaatatcagtcacaatggcacggatcatttggcctccaacaggcgaagttgcagttcacactggaataaaaactccagtccctccagatgacggcgcgcctcggcgacatttttgccccagcaggtcaggccgtgtccgcggaccagaaaaccatagtgtagcggatgtgactgggcccattgagctatctctgcggccagcgcaggaatatcctgactattgtcgaaaatgggaataaccacctcgtcgaggtgcgtacgctgacccgccagcgacttctgcatttcatacccctgcaacaccaggccgttgctgtgctcaacgcgagacagcacggtcgagtttaccgagtgggtgtgcaataccgcacccacttcaggatacagtccgtaaatcagcgtatgcaaaccggtttcagcagagggtattctgccgctcggcacgtggttggtggcaatctctacctgcagaaaatcatcggcggtcagttgccctttgtccttacccgattcagtaataaggcagtggctgtcaccgtcgcgcacggacatattgccgccggtagccgggcaccagcctttttcaccaatccagtggcaggccgcaagtagagcatcaagaggattattttcggtcattatttttcctgaaaaccgtgcgtttatgagggggtccgtgccgcgctttctgactgattattctgtttcgctctgagctagatgattgcgctatttagccgtttaaacatctaagcgtctcgattgccaaatattatcatcgtgcggtagtatcaaccaataggtatcgacaattttgctatcggcaaacctcaccacattacgatttttatcgctttcaaggcgactggagcaagaaaatccatgagtactgtagcactgatcccacagagtaaactcccggcgttaggcaccaatattttctcgcagatgagtgcgctggcgcaaaaacacaacgctatcaacctgtctcagggttttcccgattttgatgggccagagtacctgcgtcaacgcctgagcgtgcacgtggcggaaggctcgaaccagtacgcgccaatgaccggcaccgccgcattgcgtaacgctattgtcgataaaaccgagcaggcctacggctaccgtcctgacgccgaaacggacatcaccattacctctggcgcaaccgaggccctgtacatcgcgataacagcactggtatcgccgggtgatgaagtgatcagctttgatccaagctatgactgttacgcacccgccgttcagctggcaggcggcgtgagcaagcgtatccagcttctgccgccagagtttagggtcgattggtcaaagcttgccgaccagattaccgaccgcaccaaagttatcatcattaatactccacacaacccgaccgccaccgcctggagcgaacaagacgtcgagcgcctgtggcagatagtcgccgagcgcaatattttcgtaataagcgatgaagtctacgagcacatctgcttcgccaaagacggccacgccagcgtattgcgccacccccagttgcgccagcgcgccatcaccgtgtcgtccttcggcaagaccttccacatgaccggttggcgcgtgggctattgccaggcgccggcggccattagcgccgagctgcgcaagattcaccagttcctgaccttcgccatcaccacgccggtacagcttgccttagcggacatgctgcgcgagcacccagaacactggcaggcgctgccagagttttatcaggccaaacgcgaccgtctggcacaggggctggcaaaaagccgcctcaaggtattgccaagcgaaggcacctatttcctgctggtcgattacagtgaagtctctgatttggatgacgttgcattctgtcagtggttggttgaacatgtgggtgtggctgcaataccgctttcggtattctgcgccgatcctttcccacataaactgatccgcctgtgcttcgccaagaaagaagccacgctggacgccgctgcggagcgcctgtgtcaactttaaaactgtcggtattacaacagccgctggtctggctggacggtgaagccaacctgagccattttgactcactgctggggccgttgattaatcgtgacctgattatcctgccggaaatgttcaccaccggttttgccatgcaggctcccgagcgcgctctgcctgaatctcgcgtcgtcgagtggctgcacaagtgggcgcgcaatctgaacgccatgataggtggcagcgttgcgttgtctacgccgaagggcgcggtgaaccgttttctgctggtcgagccgcagggtaaggtgcatttctacgataagcggcacctgttccgcatggcgggtgagcacaattattacgtcgcgggcacacgtcgcgaagtggtcgaatggcgcggatggcgcattcttccgcaggtgtgttacgacctgcgattcccggtatggtcacgcaatactcaggattatgacctggcgctttacgtcgccaactggcctgcacgccgtacgcatcactggcaggcgctgctgaccgcccgcgccatcgagaatcaggcttacgtcgcaggctgcaaccgcgtcggcgacgatgataatggccatcactacagcggtgacagcctgattatcagtcctcagggtgaagagctggcccgtgctgaacccggtgcagcgatgataatcgaagccgaactgtctctggaggcgcttcaggaatatcgcgaagctttcccggcatggctcgacgccgacagcttcctgcgtcacgactaacggccttagctctgtgggagttcaggctctcacagagccattaatgtaaactcatatcactgtaccgatagctggtgcaattcttgcatccagtctcccctgctaaaacatctgacagagggtaactgatgactatcacgtttattgcacactccacgcctgaacctgtttattacggtgcgctggccgcgatacttgctgagttgcgcgcgttgccgctgtgtcacctgccggtcagattcgacaaccagcgtttcattaattctcgccagtacatttccccacaggggcagcagattaccagtggcttactctggctggaacgcttgacgggtcgcggagcgggtgcagaatttgagttagaatcactgataaatcgggcagttaaggaggatatcgtcgttccattgaatcagcctttgtcctccccttgctatgcacaaatgatccggacgatcgccgaaaaagggatcgctatcgagtccctgcaggtggtcaaaaaccaggatcgctatcagcttgaagactgcgaaaacggcaaaattcgcagcaacggctggacccgcgatcgcttcgggcgttgggtattaggcgcagtcactcagccggtgatgcgtgccggaaatcaactcagactcgccgttttgggcgatgcagccgagcaccgcgacagctatccggcgatgctcgctgcactgggagacgccgccgatgcactggcaatgaacattgagattgtcttcattcccccgacgctggtcggcagccagctcgacagcacgctctatgacgtcgatggtacgttgctgcctggcctcagcgttcagggtgccgagaacattaacgccaacaccctaagccagctcaccgtcgcgaaatgggctatggacaaccagacgccggtgctgggcattaacagcggcatgcacatgatggtcaccgcgctggggcagaaggtgctcggcgaagaaacggttgccatgcccggcccgtcttcactcagagcgctacagtcaatcctgccgctggagaaggagccggtgcgcaggggcaatcacagggtgctgttccaatctggcagcaggatggcgaagatgatgggaagagaggcgcagattcgctacaaccagcgctggcggctgagtccaaaattgctcgaccgactttcttgcacaggattgcaggtgaccggtaccgatgagtcgggcctgtcggcggaatgcatcgagctggacgaccacccgtttttcgttggcgtacaggggaatcccgagttgcagtcacgccgtgagcgcccccatcctctgttgatggcatttctacagcaagtgcgccaatgcaacagagaacgggagataagccacgatgcgttaactaagagtgtgcggttaaagcatccgtatttcttaatgggttgaacagcgcattcagggtcaccgctgccaggcaggcagcgctgatccccgagtgcagcaacgtttgtacccagcccgggaagtgatcgtaaaagctcggcatcacgatagggatcatcccgaaggctatcgacgtcgccaccaccaccagattcatattgtccttatattccaccttcgacagggtacggatgccgctggcggctaccgatccaaacagcactacgcccgccccaccgagtactggcgaagggatcgacgcgacaacggtgcccaggctcggcaacagcccgagtgcgataagaataacgcccccgccgccaccacgaaacggctcttcacgccggttaacgccaccaggccgatgttctgcgcaaaagaactctgtggaaatgaattgaacaccggcgacagcgcgctgctcagcatatcggcgcgcagccctttggcgatgcgtttggaatcaaccggagaaccgactatctcgccaacggccactaaaccggcggtagtttcagtcagcaataccagtacaatcaacagcatcgacaaaatcgcggccacgttaaacgtcggcaaaccataggcaaacggcgagggtaacgccagcgtcaagctatgccccagcgtcgagaaatgggttttgccgagaaaaatcgctaccacggtcgagagtaacatcgccatcagtaccgaaatgcgtccgatagtctggctgccaaaacggttgagcagcaggataatcgccagggtaaaggccgccagcccaatgttgccggttgagccccaatctgctgcatgggcattaccgcccattgcccagcgcaccgcgaccggcatcagcgacagtccaatcaccgtcaccaccgttccggtaaccaccggtgggaagaaacgaataatctgcgcgaaatacggcgcaattatcaggccaatcagcgaagaaacgataacggcaccaaacacttccggtaacccgccccctccggtgacaatggtcaccatggtagaaacaccggcaaatgacacccctgcaccagcggcagacgtgcgccaaagccaggaatacccaacgtttgcagcaacgtcgccatcccgctcacaaacagcgcggcggtgataagcatgcctatttgcgtcgccccagaccggctgcactgccgatgataagcggcggcgcaatgataccgccgtacatggtcagaatatgctgtaggccgtaggcaaaggtttttcccagtggcaaacgcgcgtcttccggcgcggccgctgagacggtcggtttggaaacgttattcattttggcaactcccggcggtcagctcccgcgataagttgaataagaatacgggctgaggaggataggcagatggtagtgcgcctgctcggccgaaataatgacgtcaacaatcgccaggttgtacagcgtctcacgcccgttggcggagaaatacgcgcccacgtcggcatagagtcggtagttccctgcctcgacgccctcaggggttaagcccgccgcacgaccgtccgcgtcggtcgccgtctcattgatttttaacgcctgctgaccgtcgattttttccaaccacacccgcacgttcgcggcgggtttacctaatgaagtatccagaatatgggtcgttatcttggtcatcagttaaataactccttaaagcgcagcagggttatctgctgtaattgttcagccgtctctttcagctcctgctcatcgttattctttaaacgacgatgcagatgcgcgagaatttcgtccggcgttctgcctttggcacggatcagaaaaacgcggttaaagcgttgttcatattgctgattgccttccagcagtgcctgcgtggtctgttgttcgaggcccaaagaggcctgctcggcgcgcgacagcgccgcctctttgctgtcgccctgcaagcgttcgccgatgcgcggatgctgggccaacgcgctgctgatagcctctgcctgccagccgtgactcgcctgggtggcaaaactcaccgcctcatcgacggtgtgaaacggtcgtgcgtcagtcactgcattcacccactgcgggatactcacgcaggggtcagcgcttcacgcgctgcgtgcgccgacagtgcattaaattgctctaaggtcatcttcagtccctgattaattgctgattttttactgagcaaaacctaaaaccgtgtcgatatacgcctgcgtcgcataggctacgtcttccacggtcaccgattcgtcgggatgatggctgataccgtctttacaacgaacaaacagcatcgcgaccggccagcgttcggcaattgcgatggcgtcatgccccgcaccgctcggcagcagcatcgactgcccctgcaatgcctcaacgctctgcgccaaacgctgctgtaacgcagggtcgcaggcggtggcctgaataccgtagaactgctcggcgtcaaagcgcagaccgcgtcgggcagcaatctcattggccttgcccagcagatcagcaagcagcacgccgagcgcgttatcttcaggaccgcgcacgtcgagcgacagtctgacctcgcccggaataacgttaaccgctcccggaaaactctctatctttccaacggttgccaccagattatcgccacgtgcagcggtcatcgtttcgatggcgaccatccattcggcagcggcggccaaggcgtcctgacggtgccccatcggcacggttccggcgtggccggcgtggccgacgaagccgcagttaagacgacgagcgccgttgatcgccgtcacgacgcccaacggcaaatcagcagactgcaggcaaggaccctgctcgatgtgcagctcgaggtaggcacagaaatcgttaacgtcgcgctgcgccgccagaatatcggctggattcagcccgaggccgagcatagcttcggccacggaaatgccgtgtgcgtcagtgcgttgcagccagtcctgcggccaggtgccggtcaaaccccggctgccaagcagcgtgatgccaaaacgggtaccttcttcatcggcgaaaccgacaatctccaccgccatcggcaggcggatcccttgtgaatgcagatgagccacgacttcgatagcggttaatacgccgagtgggccgtcgtagcgccccgcattacgcacgctgtcgagatgggaaccgagcagcagcgctggcgcctgcgggtcaagaccttcatagcggccacagatattgccgacgctgtcctgccaggtcgtcatccccactgccgccatccattcgcccaccagacggttggcctgaatatgctgtgcggagaggtaaacccgggtcagttcgcccggtgtttcactcagttctgcgagtctatcgcagcgcgccatcactctgagcgccgcctgctctgcctctgtactcaatgggatggctgctatcattactggcctcctaccacaccgtttgtcacggcggcatagtggtcccatgcggcctgagaaccggcaccgtatttcgacgcgaaacccagacgatttagtaccgcctcgagcgccaccagcgtttgcatcacacagtctttgcgagcgttgtagcccatggtgccaatgcgccagattttgccgctcagcgggccaaacgaggtgcctatctcgataccaaaatcgagaagcatggtctgacgcacctgctcaccgtgcacgcccggcggaataacgacgccaagcacgttgttcatgcggtggttcaggtcgccgaacacttccagtcccatgccctgaataccggccagcagcgcgtcgccgtgcagcttgtgacgagcgatggtgttgtccagaccttcttccagaatgacgcgagcacattcgcgggcagcaaacagcatgctggtcgcttcggtgtggtggttgaggcgctcaggtccccagtagtccatgatcatgccgagatcgaaatagttggagtagatcatctcttcgtcaccgtcggcgtggtcggcggtgcggatcccttcttcgatacatttacggcggcggatctgttcttcaaatttcgggctgatagtcactggcgagctgccggatgggccaccgaggcatttttgcagacccgcagacaccgcatcgaggccccaggcgtcggtttcaagcacgttgccggcaaaggatgccgttgcatcgcagtagaacagtacgccgtggcgacggcagatgtcgcccagctgttccagcggttgcagcatggtggtcgaggtatcaccctgtacggtcagcagccagcgcggtttgaccgacttgacggcgtcttcaacctgttgtggatcaaagacttcaccccacggcacttcgatggtgtgcacctcggcgcgacagcggcgggcaatttcgcacagcagatgaccaaagcgaccaaataccggcaccaacaccttgtcgcccggacgaatgcccgacagcagcacggcttcaataccggcacgcgaggtaccgtcgatcaggaaggtccactgattgcgggtcttatataccgcgcggtacagcgccatgacttcattcatgtagccggtcatcgccggatcgtactggccgatgagctggctcgacatcgcgcgcagcacgcgcggatcggcgttgattgggcctgggcccatcagcagacggttaggcgggttgatttgaccgaaggttgagatgtccaagataattatcctttttaatcaatgacttttagactactgccggggtttcgttgagtccacgcaccgacgcgataaactgtttgaattctggcgtttgcggattggcgaacagtgcgcgactctcaccctgctcccacacggtgccctggtgcataaacaccacccgatcaccgacctcacgcgcgaagttcatttcgtgtgtcaccaacaccagcgtcatcccttctgccgccagctgttccaacactttcaatacttccccgaccagctcgggatcgagggcagacgtgatttcgtcacacagtaaaacttttggattcatcgccaacgcacgggcaatggcgacgcgctgctgttggccaccggacaggttggcgggatagtaatctacgcgatctgccagtccgactttactcagcatctgaatcgccagctcgcgacattcggcggcgcttttacccaacacgcggcgcggtgcgagcataacgttttccagcgcggtcatatgtgggaacaggttgaagttctgaaacaccatgccaaccgaacggctaatttcacgcgcctgagagtcgcggttggtgatggtcatgccgcccagcttgatgctcccttcctgataagcttcaagaccgttcatacagcgcagcagcgtacttttgcccgaaccgctgcggccgatgatgcagataacttctccaccttcgatatccagatccacgcctttcagtacatggttctgaccataatatttttgaacctgattaatggtgatcagcggcattactttttatctccaagcaatgttctttccagataatgactgtaaagagagagtggatagcacatcaggaagtagccgcaggcgactaatccaaagactttgaacggttcgtaggtcacgttgttaagcatggttccggccttggtcagctcgacaaaaccaatgatcgaggccagtgcggtgcctttgatgacctgcaccagaaaacctacggtcggcgcaacggcgatgcgcagtgcctgaggggcgataacgcgccaaagcgtctggccgaaactcagaccgaggcagcggcaggcttcccattgccctttaggcaaagcttcgatactgccggaccagatatcggccagataagcgctagagtaaaaggttagcgcaaaggcagcggcggtccagggactgacgttgatgccgaacagtccgaggccaaagaacgccagaaacagctgcatcagcagcggggtaccctgaaaaatctcgacgtagacgcgcactacgttcgccatccagcgacggcgagtcaggcgcatcaacaccagtggaatagtgacgaccgtgccgccaaagaaggccaccagcgaaagtaaaagggtccagcgcgcggcgagcagcagattgcgcaggatgtcccagtcggtaaaagtcatcatcagctgtagctcccaaagaagcggcgtccggcgagcagcaacagctggcgcatcactatcgacagcgccagatagaacagcgtacagacgaaataggtttcaaagctcaggaaagtgcgcgactgaatcaggctcgcgacaaaggtcagttcctgataggaaacctgcgaaaccaccgacgatccgagcatcacgataatgcactggctgaccagcgcagggtaaattcgttttaatgacggcggtagaatgacgcggaagaaggtctggctgcggcttaagcccagcacacgactggcttcccactggcctttcggcgtcgcctgaataccggcgcggactatctcggtgctgtacgccccgaggttaatcagcatcgccagcagcgcggcctcgcctgcggtcagcttcaaccccaggctcggcaaaccaaacacgataaagaacagctgaaccacgaagggcgtattgcgaatggcttcaacatagatgccccaaatgcggcgcagcgtcgcgttgtttccacagcgaatggccgcaccggcgataccgagagaaataccgccgacagtcgccatgaaggtcagctcaatggtggtccacaaaccggccaacagctgcggcagatagggccataatgcagggaaattaagctgatacgtcatgaaatttctccgttgcgcgcgctaacttttttcattgtgaatcaggcacccagattggcaggcagcggagccttcatccatttttgagacaggccgtccaacgttttgtctttcagcgcttcgtcgatcagtgcgttgaccttagctttcagtgctggctcgtccttacgcataccgatgaagcaaggagaatctttcagcaacaccttggactctggcgctttctgcgggttttgacgcgcgatggcagccaccactaggttaccggtagcaatgaattccacctgacccgacagataggccgacagcgtggtgttgttatcttcataacgttcgatttttgcatctttcggggcgatatcggtcagcaccagatcttccaccgcaccacgggtcacgccgatagacttaccggaaagctgtttcacgtcgctcagggcatcgcctttagccccaaatacgccgaggaagaacggtgcataggccttgctgaagtcgatcactttctcgcgctcagggttcttaccaaggctggaaatgaccagatcgactttatcggtttgcaggtaaggaacgcggttggcgctggagaccggcaccagttgcaacttaagtttcatcttgtcggccagatagtgcgccatatcgatatcgtaaccctgaggctgcatatcagtgccgatagaaccaaagggtgggaagtcctgtgggatagccacacgtagcacgccacgttgctgaatatcctgcaattgatcggccaaaaccaacggtgcctgaatcatcagcatcgccgcacctacccacgccaacaaccgtttgttcattttcatttgagactccccgggttaatagtttatgaaacgatagattcttatgccatgcattctgcaactaatgtgccaaaaagcagaaacaggcgagacatattggcaatgcctcgattcataaaggattagcgggagagataaacaaagcagcgggcgaatttatcgccccaaagcggggcaaaagcggcgcacctgaaaaaacccttcgcacctaaaacgtgcaaaagcaccaattcagggctttgttttgatcagattagcgctgctcaagctcgtcgagatcgttgtacaggtcggtaatttggtgaatacgctgccgacctgaagccagcatttcatgcaataaagcattgctgagcagattggccagactcatcgccgccgaataggagtcgaaggctgagacactgtcgagagaagcggccagatgccagcgcgccagtgggataagcgactgtgcctgcggctcgcaaatcagtaataccgggacatttagctgttgcagctgagtcagaatcgcacgggttgcgcgcgggcgacggcggaaggcgataaacaccacgacgtcctgcggggtgaggtcgaccagctcttcggccagggtctggcccggctgcggcattaacgtcacctgatttcgcacctgcaatagctgctggcgcaggtgtaatgccaccggatagctgttacgcatccccagcaggcgaacctgtcgcgcattgctcagtgcggtaatcaccgcggtaaactggctgccgtcaatctgattgatccattgagtcaggttagccatttcctgcttgtaatggcgcgacagcagcgtattgccctgcaccgcgtcacggctgtcggtcaacggcatcccgctctggcgcagggttctcacctcatcgcgcatatcgcggtagctgggataaccgagacgtttgaacagtcggctgaccgtcgccttcgagacgccgctgaggcgcgccagctcggcgctgttgtagctcatcaggtcatcgatgtgatcgaatataaaatccgcaacccgctgttcctgtggcgtaagctcggcgtaataaccgcgcaggcgttcgtcgatctgtttcatgtgttgtttcctgtaaccaacgtttcagccgaagatatcatgacctacaattccttaggcaaataaatttcactcgtttcactttctgcttttgctcacagatttagaaaactttatccataagcagacgatctggaacagctcttgcttattgaaaaccaggtatcaattttttggacaaaggatcacggcatgattaacagtaacagcgcaccgctcggtatggcggtcacccctcaccatcttgccagtcagagcgcactggcggtcttgcgcgagggaggtaatgccattgaagcgatggtggccgccgccgcgacgattgccgtggtctatccgcatatgaacggtctgggcggcgacggcttctggctcattgtgccgccgcagggcaatccggtcgctatcgacgccagcggggccgccggttcgctggcgtcgctcgatttctatgccggggagagccacataccccatcgtggtccgaaggccgctttaaccgtcgcgggtacggtgggtggctggcaggaagcgctgaacgtctctaacgagttaggcggtgagcagaagccgctttcgcggttgctgcgcgatgccattcgctacgcggccgacggctttccggtcacggcctcgcaggaggcggcgacacacagcaagcgccacgagatggagtctatgccctcgttcgccgaggtgtttctgccgaacggccatgtgccgcagtgtggtcatcgctttactcagccgcgactcgcctcaacgctgctacagctggcagaagaaggactcgacagcttctaccgcggtgaacttgccgacagcatggccgccgatatgcaaaagctcggcatgccaatcacgcacgaggatctggccgcgtatcgcccgcagcgccgcacgccgctgaagctcaagcacagcaaaggcgaaatctacaacctgacgccgccgacccagggtctggtgtcattggcgattcttggccttacggaccgtctcaatcttgaggcgatggatgagggcgcaaccattcacagcatcgtcgaagccaccaagctggcgtttggtcttcgcgaccgcttcattaccgacccgcgcatcatgacacaggacgcgcaggcgctgttggatccggcctatcttgatgccctggccacgcgaatcaatccgcatcgcgccgccgactggggcaaaggtaaaggccccggcgataccgtctggctgggcgtgatggacagcagcgggctggccgtgtcgtttattcagagcatttatcacgagtttggcagcggcgttgtgctgccagacagtggcgtcatgtggcaaaaccgaggggcctctttcagccttgatgccgaccacttgctggcgctggcacccggcaaacagccgttccacaccctgaaccctgcggcggcacggctctacgacggacgtaccatggtctatggctcgatgggcggtgacggtcagccgcaaacgcaggcggcggtgtttatccgccacgttattcagaaaaaatccctgcaagagtcgatcagcggtccacgctggctgctgggccgcacctggggacaaagctccgactcactgaagctggaaagccgcttcagccacgcgacgctggccggtctgcgccagcgcggccatgacgtcgagatgctgcccgagttcagcgaggcggtgggtcacgccggtgccattgtgcgtcacaccaacggcatgttcgaaggcgcatccgacccgcgcagtaacggcagcgcggcaggattctgacattgagagggagctgcggctccctcaccttagcccttccccgctctgagggaggtgattaaatagaggagaatttatgaaaaccacatcttctgtgccacccgccgattgggctgcctatgtgagccagatggaggctatattggccttggacctcgacgacgcccgtcgtcaggaattgttgacgcagtttagccgcatcgcacagatggctcagccgttgatggaccttccgcttgacccgcgcctcgagattgccggggtctatcacgcatgaaacctttacacgaagcgggcatcgacgacatccagcaggctctgaagagcggcgacgtatctgccaccgaaattgcccgtcagacgctcgaaaacatcgagaaagccaatccggcgattaatgcctatacccatatcacgcacgaacgcatgctgagtgaggcggcgaaggttgataaactgcgggccagcggcgctgagctgccgccactggctgcggtgccttacgcagtaaaaaatctgctcgacgtgaccggcgaggtgacgctggccggtgccagcctgaacagcagcaatccagtggccaaagaagacgcttggaccgtcgcccgccttgcacaaaacggcgcactgctctccggcatgctaaacatggacgcctacgcctacggcttcacgacggaaaacagccactacggggcgacccgtaacccacgcgacctcgaacgcgtagcgggcggttcttcgggcggatccgccgccgccgtagcggcaggcctggtgcaattcactttgggcagcgacaccaacggttctatccgcgtcccctcttccctgagcggcattttaggactgaaacccacctttggccggctgtcgcgacgcggcagtcagccctttgtcgcgagcctcgatcatttaggcccgatggcgcgcagcagcagcgatttgtcactggtgtacgatgcgctgcaaggatatgacagcgccgatgcgtttcaggcccacaaaccgacggtcgagaccttttcacagctgacacgcggccaacaggggctgcgcaccgccgtacttggcggctttttcagtacctggtgtgacgacaatgccaaagaggcggtgaaacgggtcgctcaggcgcttgaggcgcaggaagaagtcgagatgccgcaggccgagctggcccgttcggcggcgttcatccttaccgcctccgagggcggaaaccagtatttgccccagttgcgcaagatcccggaacagttcgagccgctgtcgcgcgagcgtctgctggctggcgcgatgatccctgccgcctggtacgtgcaggcccagcgcttccgtcatcagtttcagcagcaggtgctaccgatgtttgaacactgggacatcctcatcgccccttctaccccgtgcccggccacccttatcggacaggaatcgattgaaatcaacggcacatcgttgcccacccgcgccagcatgggcatgctgacccagcctatttcgttcctcggcctgccggtagtttccgtgccgctgacgacagcgagcggcctgccgatcggtctacagcttatcgctccgccgtggcgtgaagatctgtgcctgcgtgcagcatgggcgttggaacaacaggggatcgtcagcgtcaagagctcgctgattggctaaaacagacattttttgaaaatcgagaaatagatgaaaagtgaaaatatcgatcgtccggcgattctggctgaagtgaatgcggcgttctatcgctacgaacaggcgctgattaccaatgatacggtggtgttggacgagctgttttggcacgacccacgcaccgtgcgctacggagcgggagaaaacctctacggtatcgatcagattcgtgagttccgcgcttctcgccctgctcagggactggatcgcgacctgcaaaacaccgtgatcaccacctacggtgacgatatggcgatcgccagcaccgagtttcgccgtaaaggtaccgacaagattggtcgccagatgcagacctggatcaagatgccgagcggctggaagatagtggcggcgcatgtcagcctaatggtgtaagcggggaggctgcccctaaagccgcttttgtgggcggctgccctggacctgcttttaaggacaattaactccgaggcgcttttccggtttgaaagcatcaaggggcatttacctttccgcgccgtcctgaacccgcccatgtgaatctggcgcagaaaagacataagatttaccgctgctgatgcagcaaagaacaaacaaaaaaatcccgccgttagaccgagcgtggatttgacctcaaggttgccggtttttgtttgagagggggtttgcggattcgggacagcgccgggcgacgtgtgacgagacgcgtttggctcggaaccgagacggggaaccgcgaagcggcgtggggtgccaaggggtcttgacctgggaaggccccttggctggtttaggccagcgcccagcgcgcaaggcgcgtgcatttgaccttaaagacaaggcgcatgcctttgacccaagagactttgaccttccccaaaaatttgcaattaaaagcctaatcctaattgaaattaaaagccctcccccattagatctaacagcagatcccccctaacatcattgcctgagcattcagcgaagcggaaggttcatccccagagacaacaatgtcgtggcctgggcggccagcggggagttatccggcgagatggcgacaacctttgcaccgcgatcaacggccgttttggcaatctcggccagaacctcactctcctgactcaccgaaagcatcagtaccgcgtgttgagacgacaaacctgaggcgctgatgcgcataagctcgacgtcttgaaacgcataagctggacatcccgcccgcagcagaccgtttagcagctcgctggcgaaaaatgtgcaacgactctctgtgttgaaaatatatacgcctttaaccgcatcagaaatcagtgacacagcgtggataaaggctttttcatcaaagcgttgcagctgaagatgtatgcgctgctcccgttggttgagcctttgctgccacgccgccgaaccgaaaccgctggttttttcggactgcgcggccatataacgcgaacccacggcgctggcatgggccagcttcatgcgcaggtcgcgaatgtcatcacagcccatcgatttggcaaaacgggttatggttgccggactcaccccggcctgggaggccagctgctcaatggttgccgacgaagcgaaggcgacgtcgtcaagaatagcttgagcaaccttgctctcttgctggctaaactgattttgctgcgcacgaatctgataaataatgtcgccaatatcttcataaccgatagatttagcgaaacgttgcatgatttctggactgacgccgggcagcttaccgaggagcgttgccgaagcaaaggcaatatcggtcccgcccggcaccggcttcgacacgctggtgtcaggacgttgcgtcgccgtttgtgcgcgcatgtgggtcatgaaatcgttaatgtcctgacagccgagcgatttggcaaagtgcgcgatggtctctgtactcacacccgccctcgaagccagctgttcaagagtggcatcggaggcaaacgacggattatccaggataaccttgaggactttcttttcctgtcggctgaatgtcccctgcaagaattgaatttgataaacaatatccacagctgagttgcccttttctgatcatcgacccaacaggttgcttttaactcagcctaccagaacgtcgtgaatttcacacagccgagatcttccctcagcacggttatttattcctcagcctagcaaaatgaaaataattttcaaataaattcacttatctaacttcaggatgagagagacatcacaacattttaattaactataagaaaaataagcaatttattaagaaaacatttaaccactttgagcatatttagggtcagatcacattcatgaaaaaaaatttcaccaataaaaaatcattatctgtttgtttttattatatttaattgaaatccataattaaaacctatgatttagcctatttacttcatgtcgaggctggcgttttatatttccacagccactcaggctccaaacagggaatccagatgatgcaaaaaatatttctatgctgcgctgccggtatgtctaccagcatgctggttcagcgaatgaaaaccgaagccaataaacgacaattaaccattgatattgaagccgtaccggttgccgattttgaaaagattatttctttggccgatatcgtactgttagggccacaggttaaatacgaacacgctcgtctgtcagatattgcggctgcgcaaggaaaacaggtcgaggttattaacatgatggattacggcaccctgcgcggggataaagttcttgatcgggcattgagccttatttcctgaagatcaactctttaagttaagcaatcaggagccctatggatcttgacatcatcaacgtcgaaagcgtggatttagaaaataagctaatggaactgctggttcaggccggcagtgcgcgaagttcgctgctgtctgcgctgagaatagcgagaagcggcgatattagtgcagcaattaatttggtcgaggaggcaaaattatttatttcctctgcccacaaaatacaaaccgaattaattggtctggatgaagggtctggaaaaataccggtgagtttaattctggtgcacgcacaggatcatttaatgaacgccatgcttattcaggaattagccagcgatatgattgagctctatcgccgtaacccgcaaggagaatgtaatgactaagattagtgtaatcggcggtggaagcagctatacgccagagttggttgacggactcattcaacaccacagcgaaataggcctgagcgagttggcgttggtcgacgtcgaggcgggtcgcgagaaagtgcagattatcgccgacctcactcgacgcatgttaaaacgcaacgggctggaacaggtcaaggtctccgtgcacttctcgctggatgacgccattcgcgattcaagctttgtgctaacccaacttcgcgtaggccagctttccgccagggccgccgacgaacgtcttgggctaaaatttaatatgctggggcaggaaactaccggcgttggcggtttcgccaaagcgctgcgcacgattcccgtgatgctcgaggtggcaaagacagtcgagaggctggctccggatgcctggataatcaacttcaccaatccggcaggcatcgtcaccgaggcggtcagccgccacagtaaggccaatgttatcggcctgtgtaacgtgccggtgaacatgcatcatatgattgccaatatgctacaggcgccatatgaggacgttgagctacgttttgccggattaaaccacatggtgtgggtccatcaagtcgcgctcaaaggcaaagacgtcaccgagtccgttatcgaacgcctgtgcaacggcgaaaccctgactatgaacaatatcaaggataccccttggccaccggcgtttctgcgcgcactgggcgcgatcccttgcccgtatcatcgctatttctaccaaactgacgcaatgctggctgaagagttcgaagcggccgccgagcgcggcacccgcgccgaacaggtgatgaaggtcgaggccgagttgttcacgctgtacgccagtcctgacctggccgaaaaacccacccagcttaatttccgtggcggtgctttttattccgaggttgcggtggagcttattcgggcgatccacaccaactcaggcaaagtattagtagtcaacactacaaataaaggcgccatcgctggacttccttatgatgccgtcgtagaaaccaactgcgtgattaacgcacagggcgcacatcctctttcttttggcccgctgccagaagccatgaacggattgacgcagcaggttaaagactttgaacgcctcaccattgaagccgccgttaaaggctgtaggaaaagcgcgatattggcgctggtgacgaatcccttaattggcaatgccaatattgccgaagaaatgctcgaagaaatcctgacacagaatcgccgctatttaccgcagtttaactaatgaaacattaccctataaatttctgactgcatgatgactgaaatagaacgggtaaaacaggggggttatggctaatattaataatattatagaacgctacgtattaccggcagcattaaaaatagccggacagaaacacatattatccgtacgtgacggcattatacttaatatgcctttcatgctgattggttcgttctttcttatcttcgcctatttacctttccccagctatgccaattttatgggggaattattcggtgcggcgtggcgcgataaactgctttatccggtaaaagccacctacgatattatggcgatcatttcgagcttcgggattgcctaccgtctggcagaaaaataccgcggcctcgatccgttaagcaccggcgcggtttcactggtcgcattcttactgaccatccctcaacatacgctgttcaccccggtggtaggcgctgaggcgatgatggtgaaaggcgtactgcccatgaactttatcggcagtcagggctgtttgtcgccatcattatcgccctgctttcgaccgagatttatcgcttcgttcacaaccgtgacctggtgatcaccatgcctgaaggggtgcctccggcggttgccaagtctttcctcagtctggtgccgggcttttgcgtcctggcggtggtgctcgcgttgcgccttatcgtcgaagccacgccgttcggcgacatcaataccatgattgccacccttatcggcattccgatgcaccacattggcggcacattgccgggcatgattttctcggtgatcttaatcggcctgctgtggacactcggcctgcacggtgacgcgattgtactggtgtttattcaacccatttggctgtctaacatgtctgaaaacctgacggcgtttcagaataatcagccaatcccgcacatcattacgcagcagttttacgatttatggatagccccgggcggaaccggcgcactgctgggctggtaatatttatgctgatccgcagccgaagcgcgcagatgaaacagctgggtcgcatcgccgcaccgggttgcctgtttaatatcagtgaaccgatggtgttcggcattccgctagtaatgaacccgtatttcttcctgccgtttattctgacaccggtggtgctggttattgtcacctatagcgcaatggcgacgggactggtgacgccaccggtaggtatcgcgctgccgttcaccacgccgatttttattagcgggtatctggccaccggcggtcatatctcaggacagtaatacaggttgttaatctggcgatttcgatggcgatttactatccgttcttccgactttgggacaaacaaaagtatcgcgaagagcagcagtacatcagttcacaggctgaacaggccagcgccgaggtgaacggcaaggtgtcggtcagttaaggctatctaaagttcgaggtcgttcagcggcctcggacgagcagatcattgtggccacaggcgttctattgaaaaactcaggttataagcgcacagcctgtcgaggagttccccgtcaggctgtgcgcgttaaaccgatattagcagagacttaaggacttatttcgcagggtgatgctttgcccaatggtcggcgatctcctgacgtttacagatccacacgcgatcgtgtgactgcacgtaatccaggaagcgctgcagcgcgcgaaaacgtcccgggcggcccagaatacggcagtgcatgccaattgacatcattttcggcgaggtttctccctcggcataaagcacgtcaaagctgtctttcaggtaagtgtaaaactgttcaccggtgttaaacccctgcgctgaggcgaaacgcatatcattagcctcgagcgtgtaagggataaccagatgctgcttcacctcgcctgaatcaagcttgaccggcgtccaaaacggcaggtcatcgccataatagtcgctgtcgtactgcaagcccccttgttcaaccactagcctgcgggtattcgggctgtcgcgtccggtgtaccagccgagcggctgagtgccaaacaggtctccaagaatatcgatggccttacgcatatactcagcctcttgctgcacgctcatgtcctgataatgagtccagcgccagccgtggctcaccacgtcataatctgcctgcttaatagcctcaaccacctgaggattgcgcgccaacgccatcgccacgccaaaaacggttaacggcaggccgcgcttttggaactcctggtggatgcgccagaaccctgcacgcgagccgtattcatacagcgaatccatcgacatatggcggtcagggaaactggctgcgccgataatatcggagaggaactgctcggaacctgcgtcgccgtgaaggacgttattttcgccaccttcttcataattaagcacaaactgtacggcaatgcgggcgttgttcggccagttggcatgaggaggacggccagcgtaacctatcaagtcacgtgggtaatcgcgggtaaaaccataatcgatatcagacattgtgttccctgcttgtcgctagttgttcagatctttaaagcgcccggagagtggcttgggcaaaggataatcgaggtcaccgtgcttgctggttgttaggcgcagagcgtttaatgactcaatcagacgcactgcggcgctgacgccatcgataaccggaatacccagctcgagggtcagctcctgcgccaaatcagccatgccgccgcagccgagcacgatagcgccgctgccgtcagtctgtttcgacttaatgcactgctcgcgtaccttctgctgcgccaatccgctgccgtcgtcaagcgaaagcactggtaaatcaatagagtgcagtgcggcgcagtggcgctcaaagccgtactgatgcagtaaatggcgtgcaataaccagcgtccggggcaaggtggttactatcgagaagcgggtcgccaccagcgtagccatgtgcatcgcggcttcagcaatgccgaccaccggcgcgcgagccagctcacgggcggcaagcagtccagggtcaccgaagcaggcaatgatatgtccgtcgacgcccgcattacgccctgctttcacctgttgtaaaacgccaagcgtggcaatcgcttcgtcgaaatgcccttcaatggaaggcgcaccttcatcaggacatacggcaagaatttctgtacccggtgaagcaacctgacgcgcggtggctgccattatttccgtcatgccgaggctggtattgggattgattaattgtatacacagcgatgaacgcgtatcgcgagataatgattcagccattattgcgcttcctcgccctgcacctgccggtccacaatgcctgaaaacatctgggcgaaatccggcgtcggaccttcgctgttctcgaaacgcaggctggcgacaatattgtcaaaatgctgagccattttctcggccagcgcaactgcgtcacgttttttaagcaacgacagcagaaagtcatgatcgtggcaacggcatccctgctgccacggcgcgccccaggcagcgatagccagcgaggaacgtagggtcagctgtgaaaccgtttcggtcagcactttattgcctgaaatggcctgcaactgaacgtgaaacgccgcagacagacggatcgccgccgggccgttacgctcctcgtgtgcaaccttctcttcgttgaccaactttttcatcgctgccagatgcgtcgactgacaatgcgccaccacttcactcatattggcacactctaaaattttacgcgtggtgaatacgctgcgcgactcttcggcgtctggcacggtcacgtgcgcaccacgtttgggcaacagcgtcaccagttgcactgcggcaaggcgctgaagcacgcgacgaatgccggtacggctcacggaaaacgcctcggccagggcttcttcgggcagtttgttaccgggcaaaagctggtgttcaacgatagaacgcaccaacgcgttgtaaatgtggtcgtccttatcctcagtaaaataagccgtattcaggccgttccagctggtcattatcactactccgtataccgaacagatacttaatcgtatacatgaaaatatttttttgtatacaaaaaatgaaatttggcctaattcctgcactgaacatttgaatgattaattttttggatcgccggacgccggcctcccttcttccaaatgttgtttatgacaggagcacgatctatgccaaacaagggaaacacctctgctgctgccccggagaatagcgccggaatcatcaagccccactacagcccgaggctgtgcaatgacgatctggctccgacgcgggaccagaactggagctggtacaacatcttttctttctggatgtctgacgtacacagcatgggcggctacgtggtcgcagcaagcttcttcacactggggctggcaagctggcaggtgttgatttgcctgctttgtggcatctgtatcgtgcagctttgcgccaatctggtcgccaagccaagccagcaggcgggcgtgccttacgccgttatctgccgtcaggcgtttggcgttttcggcgccaatattccggcggtgatccgtgggcttatcgcctttgcctggtacggcattcaaacctatctggctgccagcgcgctgatgctggttctgctgaagttcttccctggccttaatccgctaacgcagccgcactggctgggtctttcggcgctgggctggatctgttttggcgtgatgtgggtcctgcaggcgatggtgttctggcatggcatgagcgcaatcaaacgctttattgatgtcgcgggtccggccgtttacgtggtaatgcttatgctggccggatggattgtgtacaaaacgggtctgagcaacatctcctttacgctggccagtaaatctctgagcgtcggtcagcagacctgggaaatgatcacggctaccgcgctggtcgtctcttacttctccggcccgctgctgaatttcggtgacttttctcgctacggcaaaaacatgagcgagatccgtcgcggcaatcgttgggggctgccgtttaacttcctgttgttctctatcgttaccgtggtgattgtttccggcacccagtcgctgttcggcaccatgataaccgaccctatcgaaaccgtaagccgcgtcggtaacagcgttgccgtggcgttgggcctactgaccatgattattgccactatcggcattaatatcgtcgccaacttcgtttctccggccttcgacttctccaactgctcgccgcaaaaaatcagtttccgcaccggtgggatgattgctgccgtgggttccgtgctgttaacgccgtggaacctgttccagtcgccagagctgattcactacacgctcgacgtactgggcgcgtttatcgggccgttattcggtattctgctggcggattactacctgatcaaacgcggtcatatggacgtggatgcgctgttcaacgcgacgccttcgggtcgctactggtatcgcaacggctttaatcccaaggctatcggggcgctggttcctgcggtgttaattggtctgctgattagctttacgccgagcctgcacggcgtggccaacttcagctggtttatcggcgcatttctgtcgggtggattctatcgctttattgcgcgtcatgaccgtgcgaccagcacctcaatgaactatatgaaggccgagctgggcaaagaataatttctgaagggatataaagcagcgaagccctgattcattactgaatcagggcttctgaatagtggcggaacggacggggctcgaacccgcgaccccctgcgtgacaggcaggtattctaaccaactgaactaccgctccacttttttactgcttactgccgctccatgtcactggaacgaggcgaatattacggttggtcgctgattccgtcaatgctttttctgacaaataattctatttgctcagtatttcctcatcacgctgtttttcacgccagggatgctttattttcactcagtttccggtggcgccggtcgccacaaacagcttccgcccttcttcatcaccagatcgagacgcgattcatgcgcgctcaattcttcatcgctggcaaacaacaccttcaaacccgaggccggtcgcaggataggctgaatatccaacccgtcagcgccggtattctgctcgccttcgtgggaaaacttcatcaacgtctgcccaccggtcatcatcagatagacttcggcgagaatttcggagtcaagcaatgcgccgtgcagcgttcgcttgctgttgtctatcagatagcggtcactcagcgcatcgaggttgttacgcttgccgggaaacagcttgcgtgccatctgcaggctgtcggtaatcttgcaaaacgtttcggttttggggatatcacgccccagcatgccgaactcgtagtccatgaagccgatgtcaaagttcgcgttatggatgaccagctcaccgccgcgaatgtagtccaggaagtcgtcggcaatgtcggcgaacgttggcttgtcggcaagaaattcgtcgctgatgccgtgaacgttgaaggcttcgggatcgatcagtctgtccggcttcaaatagacgtggaaatttctgccggtcaggcgtcggttgatgacctcgacggcaccgatttcaatgatacgatgcccttcgaagtggacgcccagcttattcataccggtggtttcggtatcgagaacaatctgtctggtaggtgttgttagcatattgcagtgctcatagcgctcgtttatgtcagacttggcttttatattctgatggaagagtctaccagagatgcgcaaacaggtagaaattttcaccgacggatcttgcctcggcaatccgggacccggtggttacggcgcaatattgcgctacaaagagcatgaaaaaccctttagtgcgggttatcgactgacaaccaacaaccgcatggagctgatggccgctatcgtcgcactcgaagcgctaaccgcccctgcgacgtgacgctcagcaccgacagccagtatgttcgccagggaataacccagtggatccacaactggaagaaacgtggctggaaaaccgctgacaagaaaccggtgaaaaacgtcgatttatggcaacggctggatgccgcgattcagacgcacaccctgaactggatgtgggtcaagggccacgcgggccatcctgagaacgaacgctgtgacgagctggcacgtcttgccgccggaaatcctacgctcgaagacgtaggttatcagccagagaaatagtctgcaccgcgcaagggctagtcgtcatgctcttcgcggtaggacttgtttgcgccgacgggttgggcaatcgactgtcggcgtgcctgcacttttttagcggtgggcagcagcggcagcgtgcgtttacgtgccacgataaccgtcatacaaccgagcgccggaagatgcgcactgagcagttccccgccgtgccggtgccagggcaatacctgaaaccgtgatttaaacatcacttcatagttgagcaaactcagccagtcgatgagccttgtctgactaaacatgcggctaatgtaaggctgctttttacgcaggaagggaacgcactttccgagccctatcacgctaagcggcgcaaatccgctcaacaccagccagccatcgtctattaaaactctatctacctcgcgcagtatacgatgcggatcggtggcataattcagcgtgtggcacagcagacaggcatcgactgacttctgttcaaacggcagatagtaagggtcaccgagcacgtgcagcccttgcccgtcaggcgcaacgttgacctgatgcgagatgggacaatcttcgctgttgatttcagtactcaaattgccaattttaagcaaatgaaagccatacaacttgctccaccagggttgcagttgtctttcaagcgcggcacggtagtaatcaccacggggaatgtcatcccaggatgaaggcaccacgagctttttgcggatatgtgctgacttcatgttttgttttcaactttcaggcatttgctaaacaggagtttgtcatgaatcttatcagtattccggccctgcaggacaactacatttggttacttgatgaccaaaatggtcattgtgtgatagtggatcccggtgaggccgagccgttgcttgaggcactcggaaaacgtcatctgactccaacggctatcatgctgacccaccatcatcacgaccatgtcggcggcgtgagggcgataattgaacgatttcccgctgtaacagtgtacggccccgaagaaactttgagcaaaggcgctcagataattcttaaaaacggcgacgaggtcgaaatcggggggtaaactgggctatttttgctacgcccgggcacactttaggtcacatttcatactatagcgcaccttatcttttctgcggtgatacgatgttttcggcagggtgtggacgcctcttcgaaggaaccgccgagcaaatgtaccagtcgtttcaacgcttagccgaacttccggacgaaacgcttgtctgctgcgcgcacgaatatacagtctcaaaccttaagtttgcacgctcaattcttcccgacgattctgatatctcagcccatgaagaaacggtgctagataagcgtaaaaaggggcaatcatccctccctacaacgctcggtttagaacgtaaaatcaacctgtttttacgttgtcatgacgttgatttacaaaacaatttaaacattaacgaaagcattacgactgactggcaggtttttgcgcttttgaggcatctcaaagatagcttctgaaccttttagttgtcttttttgacgaggcaaagtagtattgctcgtcttttaagcaactatgacacacacatgaaggctaatgcgataatcatcatcgcctccgtgttgttgctagctggttgtcaggcgtccaggcaggacggcaaaataccagaacagcacgcacagagtttgtcttcggcaagtcaaagtgaagcaggagagtacacagacgatgggcagtcgacgtcggcgcagtggttaggttcgagtgaccccaatgcgcaaaagaatctgtggaacttcattggcgacgagctgaagatgaaggttccggataatcccggatccgtgagcaaaaactaaaatatttaaaaaataagagctatctccacgatgtaacattacgggcagagccgtacatgtactggatcacagagcagattaagaaacgtaatatgccgatggaactagtactgctacccatagtggagagcgcttttgaccccaaagcaacttcagcagctaatgccgctgggttatggcagattgtgccaagtacgggtcgcaattatggtttgaaagataaccagtggtatgacggtcgccgtgatgttgtggcatcgacaaccgcagcgcttgatatgatgcaaaacctgaacaagatgtttggcggcgactggttactgaccgttgcagcgtataacagcggtgaaggtcgcgtgatgcaagcgataaaacagaataaagcgaaaggtcgcccaacagacttctggtcattggctctcccgcgtgagacgtcgatttacgtaccgaagatgttagcgcttagcgatattcttaagcacagtaaaaaatacggaattagcttaccgaagcctgacgaagaccgtgctctggcgcgtgtcgaagtaggccaacagatgcagttaactcaggcggctgagatggcgggcatgtcactgactaagcttaaatccttcaataccggctataaacgtaatgttacggccctaacggcccacattacattgtgttaccaaaggcgcatgccgaccagctcaaagattccctggctgatgaagacatcaacgcagtacaggaaacgagattggccagcaacagcacgtctggtgcagcttcttacaaggtccgctccggcgacagcctgtcagggattgcagctagactgaatgtgaagtccagtgatttacagcgttggaacaatttacgctcggcgagcgtgctaaaagttgggcaaaccctgcaagtggcagacagcggcgtgagtggtagcaacagcagtattacgtatcaggtacgtaaaggcgattcgttggccagtattgctcgacgtaacggcgtgaacatcaaagatgtgatgcgctggaatgcgggcatggacaaccttcaaccaggcgagaagctgacgctctacgtcagcggcaagcagagtcctgaaagttgataccgcactgtagtcgttaagaaaaaagcaccttcgggtgctttttttatgcctttcataccgtgacctagagtcataaacccttatatttcaacaaccatagacaactgtaagccacggtaaaacgtcgaactgtggacattatgtggacacgctttttgctttacccttaagcggatttagcaaaacagcatcattcagaaagtccggcgaaaagtgagcatacgccatagtctgaagtatttttgtatgtccgagtatgcgctgtagggtcacgatgttgcccccattcatcatgaaatgagtcgcaaaagtatggcgcaaaacatgcgttgactgccctttaggtaaatccggctttacctcttttagcaacaacctaaactctccgtaatctgcatcaggaaacatcagcccggattttcgggtaaaaacttcttcaatgatttcagatgaaacaggtacggtgcgttttacagatgttttagtctgaacgaaagttacttttccattcaccacgtgctcaaccctgagctttttcgcttcccccacctggccccggtgcttagacataacaacgctagcttgtggttgtcgccggttaaggcatcaagtaggcgatccatttctggcttggaaagaaagcccatagcggtctgactctccttaactttcgttattcccctgattgggttctgaccatgataaagtccagaattcgtcaagaaagtaaacattccagataaaacagcaatgtttcggttaagcgttgaagccttattcccggccatcaatctttcaacacgatattttgcgatcatcttgttatcgatttggaaaaccgcaggtgaccccatgcaatcatccatcctctttaacttcccatgataatccactccatgctcaacagttttaccgtaatactgccaccacagctcaattaactcagttagagatcgcttgtctttgggtctggcaagccattctttatcgtggtagttcaccacagtatatttttcgaaggctatagcttcatgttttttatcaaacttccgccgaatgcgttttccgtttcgtccggtcggtcttacgtccacttcatatcgaccatcttcgagcttcttaatcgccatagcgatgccctccgatgaaatatgaattttggtaacaaatagtgaaaatatatttcttataaatcgttaaccaatcttttggccggattggccggatgttattccgtcttgcccatagtgtgcgagggccggcgcaatttggccggcctcaggcgctgtctgtccagacatgaaccacagcgtgtatttcttaaatcttggatgactaagcattttcatagcggcatccaaccccatgctttttgagcgtgtttcatagctagataacgagctgtatggaacacctgttatctcactgaattctttgcgatttaacctttcagactcacgaatcagctttaatttttctgaagtgtctattgacatgtaacccccattgcatgatattttgcaaatcgtagtaattagttgttcataggaaaactaaaaacactttagtcaactagaaaccactataagcaaccagttgacctgattggagagattaacagatgagcaaagagatcgtaagcgtgtctgatgccattccttatccggaatttgcccgccttattgggaagacacctgaagctgtaaaaggaatgattgaaaagaataagttgcccattgttgaaatgcgcaaccctgaaaatcctaccgcccgtgcagagtcttgggtttatcttccagcctggaacaccggattaaaattagcttttgatagccgcccgaaagaaatccgtgacggctggctaatgtggctaggtctgggagaaccatcagcatgaaacagcaattatttactgcaccattaaatggactcacttcagcaccgttctatatcgccgccaactgtgttttgaacatttacgacctgcgtcaggagcatggcaaaggagtttgtgatccaaatactccagctgaaattgagtgggccgctgaacagttgaattatctcgcaggtgttgcagcttacaccggtagtagggaagcaattatcttgaggaacgccgcagatatctggaagcgttacgcaaggaaacctgatttattccccgtagaaattgaggtctgataatgactttgacaacacaatccccatcactatcttcattgttggttaatcaccagcgccccgcaaaatgggcaaataacggtttctggatggagttacccgctggcagaaaatatatagccgatcctaatgctcctcattcccaagtcgtcggtcaggaaagtcagcgaccccgatggtttgcccggttgatgggcatatttttttgaaggtagcagctatggaacaattaaaagaaatgtcgtttaaggattttgctgtcgattggcgcatcaaggctaaaattgccagtaataatgctgcacgcttttttaatatgaatcctcaacaagatcgacatggcgaggaagttggacgcgcaaacagagagatgattttatttcgcgctaacaggattgccattcgggaaggaaaggagaagcctttccgtgaaaatgatgctgataagaactttgttgattttaccgaggaacaaaggatttttattatcgacgcattaaatgaaatcagtcattttggcaaaaacctgccgagttatatccctatagctgattgtcggattaacatttaaaccataaaaataattttcggcgttttattacgtcaggtttcactcatttaaaattcaggagtagtcaatgattaatttttcacttaaatattttctgaagagctatccacgccgtacattcgctgttgtgattatcctgtgcggcagtatttggttagctgccgcattagcagcacttgctatcatctggggtctagtatgaacagcgttgtgcgctcacctctaaaatgggtagacagcaaagccagtgtaattgccgagttacgccgccacttaacgaagggtaagcgcctgatcgaacctttcacgggttctgccaccgtatttttgaataccgaatatgacgcttatttgttaagtgacattaatggcgacctaatcaatatgttcaatatgataaagcgtaacccaagccgctttattagttatgcggccagcctgtttaataatgaaaataatcctatttcttattatcaactgcgtgatgaatttaacaggtcaggcaaccaattttatcgcgctgcacttttcctttatttgaaccgtcacggatataacggtatgtgccgctataaccagtcgggaaggtttaatatcccgtttgggaaatacaaaagcccatattttcctgctgccgatatccgtacctttgcggaaaaagcagataaagccgttttcctgtgcatggattttagcgagtgcatagaaatggcgaatccaggcgatgttatttattgcgacccaccttacatccctacttccaaaactgccgatttcacggcctatcacacggctggtttttcaatcgccgaccagcaacgcctggctgatgcgctgcgtgttgcttctgcccgtggttgtcatgtcgtggcgtcaaatagctactcaccagaagccttaaagatttatgacggcttcgaaattaatcaaatagacgcgcgccgctccatcagttgcaagtctgatgggcgtaataaagcgcgtgaaatcatcgcaataatgggggcgtcgctatgaatgtgaatctcgcaacactggttgctagtgagatttgtgatttttgtgctggccttggaagcatcggggagcccaaagaccacgacgcaattcaggcggaactgatgcgccgcatattacctttagttgggtccgtcctaattttagatgcgactgagcttgttgaagggcaaacagtagcgacagatgcagcctggttgtatggggagtttggcaacgaagatgaggcacaagcatgggaagccttactctcaggagagctttctaagccggaagtaattaactgctggtcatgtgaagaaatgctgactatcggcgaactatctgaaaatgatggattttgctctcactgcaataatgaaattgaattaaatgatgaatgataatcgggggcgcaaagccccacgccgccgcccccatttcgtgaaaagaagccagctgatacccagtgggcttatgcatggaactcaccgcgtgaagctgtgcgaccggctgaatacccaacttatgccgaaaaagttgccgccgatcaggcgttgtacgcgcacgtggcagagattgcacgcgcctatgaaaagcttgatcaacagcctgattttattcaacgcgtagtgatgggaacgatcaccagtctggaacagaccaacggtgttaaacgggcaaatatgtacttaacgaaaaatttcgttgagcgcatatttccacgtcttaacctggtcaattcaaaatatcgaattgaagaaacaagacctgataacgtcatttttcagtgggctttcaaccaccttccggacttaagcacagaaaaaattgacgcgctggcggaggatattgcgcagtttgttgcgatggaactgagtaaggttagtgaagaagccacagcgcaaaatctatctgattttaaaactgccgccgccatgtttagccgcgtaagaggtattgccaaagatatgcggcaggacttgccgacaaagaggaaaaagaaactttctcttgaagatatgacgccagttatcgcccgcctgtattcccctgattggtggaagaagagattgcgccgctatgcggcaatctggcgtgagcacctatatatagcctttggtcaggtgagcaagaaaaccagtgcttatgccagccgtaaagccattcttgaatggcgagagcaaaagcgccgcacccgcgagtttctaaagtcaatggagcttgaggatgacgaaggcaatcgtatcagtctgatcgataaatatgatgcgagcgtatcgaatccggctattcgtcgttgtgaacttatgacacggatacgcggttttgaaaatatctgtgaagaactgggctatgccggtgagttctacaccatcactgccccatcccgctaccacgcgaccaatgttcacggccaccgtaacccgaaatgggacggcaccagcccatcaggcactcaaaagtacctctgtaaaatctgggcgcagatccgcgccaagctggcccgcgagggtgtaagtatcttcggtatccgtgttgcagagccgcaccaggacgggacgccgcactggcatatgttgatgtttatgaagcccaaagatgtcgagtttgtacgagatgtgatttctgcttacgccatggatgaagattcttatgagttgcgaaatgaacgcgcgcgcaaggcacgttttcacgttgaaaccatcgacccagacaagggcagcgccaccggctatatcgcaaaatacatctccaagaacatagacggcttcgcgctggatgatgaaacagacgacgagtcaggaaaaccattgcgagaaatggccgcctcggtgtctgcctgggctgcacgctggcgtattcgacagttccaatttatcggcggtgcgccggtgacggtttatcgcgaattgcgccgcctagataatcacgacgtggcaattggtttgtcggtggaatttgccgccgcacatgatgccgccgacgttggcgattgggcaggttataccaacgcacaaggcgggccgttcgcgaagcgcgccgcactggccgtgaaaaactggtatgagtccggcgaagagctatcagccttcggcgaggaagtggtgagaattcgcggagtttatgacacgcaggtcgggagtcattgcccgatcatcacccgattggttgagtggaagatagtgcccaagcgtgccgttgatttggccgttgatttaagcggcgcgaacgcgacgccttggagttctgtcaataactgtacggggccgggcatcgggccacaggatggcagaatagaaaatgatgctcctccgttaaacctggataagctgacaccgaaggaacggcgcaagctggtgagaagagttagggacgcggcaagccaggagaaagagagaaagcgcagccgtgcacttggcagtgtcatcgatccaggcataaaacctgaagtcatagagaaaatgcgggaggcttcacgcattgcatatggctacgaactaagccttggagagattagagttttacttaacggccaagtgctgcgcgctgatgaagaatgttttaggggccgaggtgacggtgaactctatgcagtgaaaacacaaccgaagccattagaagcattccaaaaattaagagaagagtttggtccgaaacatgaaagtccacagcaggaaatactcagaaaacatctatataagaccgcaaagaaacgataaaaaaccaccaaccgcctcaaaatttcaattatcgagtatttcaataaatcatgaaaggttttccgcctttaaatagaaaccttcacttacattattttttaatgaaaattcctgacaaaccaggcagggtcataaattttgatggatcaccttttttatgagtatcatcacttttaattcttgatgtcgatgtcattagaacacataattttcttgctctcgttactccaacataatgcaaatctagttcctgcttccaagttgggtaagatggtggatcatcaaagttaccagtaaactctcgccttgggaaaacccattcataaaggtcaagatgaaatacaacatcaaattctagaccttttgccttatgcaaagtcataagttgaatttcattcttatttttaatttcaaattgttttctaattgaatgatcagatagtattaaattaagaattttaacaatgttagttggtgcttcaaccccataaatgcatattgatatactttgaaagcaagctaatacatccttatctaaggcaacccttgctgttttaatactccttctaatctctttacattttttctcggtgaaatttgatgctatatgttcggatatgacatcctgggagttgatagtggggttatatctataatgaagcaaacctgtaaacaatttagagaaaatatcattagaaattgcaaatggattatcttcatatattctatgagcgacagagagtcctttagatacattttttaatgtgtaattgttgcgcacgagaatcgcaatctccatattgctatctacatgaaaacttgactttatactttcaatccaagaggagattttttttgcaatgttagtttgtgtaccttctattgtatattggtaaactctaatatcctcttcatcaactaaatcacaatcctctttaaataatcgcctagcataattacttattgatggatggcatctatgatttaaactcatatcgaaacatttaaatccaggtatgttatttttcaactcatccataccctttgaatccccgcctcgaaattcgtaaattgattgttcttcatctccaacagaaactccaacaatgccgagttcaaccaactttaaaaataatttatgctgcggttcagaagagtcttgatactcatctacataaacatttttatacttcactgaaagatatttcttacaggaaatagattgttccaatacgtagttagcaattaagccaactgaactcataagaataaaacctttattatataaatctctcagtagtgagagggtttcaccatgcaaatcatcagttagaagtgatttagatattaaagaattgtacttctctctatcatcttcagttaatccgtcattataaataacttctatatcagacccaattacaccccaaactcttgaaataaatggaaatattacctccttcaaacaaaaactatcaattgtcccaaaaaaactttgtttaatgtctaaagcattgcgtctacatctacttttaagttcctcgcttgctttaacagtaaatgtcatggcaattacaccttgatagtttttaagttccggtagagacctccttattttctcaactacaaccgtagttttaccacttccagggcacgcagttataaccatattaccagaatggtatatggcctcttgttgttcgggtgtaaaatttaaagtcatgaattaggctccagtcactaaattttctatgaaaaggattggcttaattaactcaccatgtttcaatcgatctaactgacctttagagtattccaagaattctctcattcttattgcttttttatcctgaagatattttattgccgctgttaaattatttcccacatcagcaaaaccacagattaagtcaggcacctccgcagctaaatcattttctaaatcaatcttagacaaaaagataccatgttggttaattttttctgatgctccgctccaaattccattacttagagtatcactgggagataaacctgccgggccatggactaatggaggctctccaattaacttataacaacgattaacaccggagaaataggagcactctaatcttttcactgtttttttcgaaacatcattatcagttcttacaactagaggaatttctaatgcattcaatatttttttataaacttcgaattgtactccatctacagaaagaacagagatattcagataatcaagatcaatgccaaattctttagctaactctgtatagaacattttttctgagggaccttcaactaataatacagcattagaaaagaatgcttctgctggaagtatgctcattctatatcccatagaaccccaagcgcttgagatacagtccgagcatccattgctcgctgcacttgtagctccatccttcatgaggagtcgaataatagaatccggtttatactgtgaagttatttgtggagaatgagttgaaattattgactgcccaggtaattttttataaaggtaatctgcaagtttcctttgttggtgaggatggagatgagcttcaggttcctcaacgcaataaatgaccacttcattttcaagatcgtgttcttgtatgctttttgctttccaaagtgccaacaatatttgattattccgcccatcccccccaagcatcacctccccgccatttgtactagcacctaaatccaacttatcaataaacgaattaacctgaatagctcctgcaccaagttgcactgagtaccctgaattatgatgagcaagcaatcctaattcatgattaacattttttgttgctgcagaaacataatttaactgcccaacacgtttattgactacgttaagtaaccttgagattctttctactttatttttatctgaatctcgttctggatcacttaaattttcatttgaaatttttaatagatactttttctctttttgaataaatcgctcaagatcacgctgagagtttacatacttcatattaagatgttttaaataaaaccggccattaatagactccatttcatcgggactctggccaattgaaatctcatagctcaaatcatttcttttagccctatattttatgatagtttccccaccatcactaacatgccctttcaataatgagactatcgcatcctcattaacttcaatgaaagctaccgtgatttcaagttcttctgcctgatttccatcagtcccaatatgaaagtccatttcgttaggctcaatatctagctcagatagactcttatcaagtaagactcttaaactatatatcatgttagttttgccaatatcattcgagcctattactaaagtgttttgcgcgaaatttattagagcatcagaatagttgcgaaagcctttcagttttaaagattcaatacgcatagttttaaccccatcaaactattagcaagcttataattaacatttatgatacttatcatataaaaatggtttcgttaagataatacttaatgaagctaatgaaaataggtgcacattgttgcattcggttgcacactttttctaatagtgtttatagcccctcccccatatcaggcgcgggattgcccaggctgcaaaagtgcaaaaaaaggcaccctttttgtgcgcgggcgaggcggggagcagtcgcgcgctaagggggtacatagggtattcctccaaaatcgtttttttggccgaaaatcggctcaatttgaggttttgagcggtgcgcccatgccttgacgtaggaaatgagaaagccccgcagcatggcgctgaggggcttgtagaaggggtgaggttcgggttattgaaggcggatcagttgctgttttctgccaaggcgtaaggggtaaagctgaacacctcaacgcccatccagtcattcaggtccttcagcacttcctgtatggggtacagttcattgatagcaaacaccttggccgccttttcaatatcacctagcccccggcgttgttgggtatcacacccatgagctgcggagggacacgatgcacggccagcatatcgtcacgggtcgcatccttaatcccggtaaattcatccttcgcggctatctggctaaatggcatgatctgtaagccgtctttcttgccccctgcggcatagacaaaaagatttttaaacgctccgcctcccctcgcatctttcagtgagcgcttaagtttctcgacgtcactactgttggcgacggggtcagtgaggtaaacaatcaccccggcatgactgccgttgatgtaataatttcggcgaaacagcgtggcctcaccgtttagtaaaatggactgcatggcggacatatattccggtgtgccgtaaatctcctgatgaatgctggggctgcgcaggtggtaaaccttgccgggcggaaatgcgtagtcttcgttgtagtaggtcacgaaccagtactgatccaggtcctcgccgcgccgcgtgtacttcgccagggtatgcttcagcttcaacggctcgcctagccggttttccctgagttcaagatatgcattcccgaacaccagataatccatgatgaacgcgctggcatcttgcctggacaacagcggatgcggtttgtagcaggacataatcacattacgcttaaaaatcagcggcgactgatgatgcacggccccttccagcatacgcgccaggccataagggctaatcggcggctcataccagcgcccatttttagcgcactccatgcagtcttgcagatcacgttggtccatgatgggggtagagtcaccgaagctaaaagactggatttcatcaatcggttgctgcactgagtcgccggattgcagggtataacctgcggcattgagactgactttatgggtggttttacggcggcggctcatggttaaaactcctcaacgaaactttcagtaccactaccggcatcattgccgagtggctcattttgcagggcatgcatggttgcccatgccaggtcaccgtggctgctgccgcgcttacggtcagaggcataggaggtctggccgccctgcgtgataaattttctgatggtcatgaagctggtcacaacatccatcatccccgcgtcatattcaaagcgtccggcgcgaataaccatttgtgctttcagtaccaactggcgtttaacggccggggtataggtatgcttttgtgccgccgggaaaaacttcacgaccagctgatacacagcctcgccaatgccggtcccgtctatatcgatatgctggacgtcataaatatgggtcagctgtttgatgaagttcgcctgctcttcaaactccataccgcgcagctgatggcgttcaatcacgcggaacttgccaccgggcaccatgggcggagccaggacgacgagaccggcactgtcccccttgtcgctgttaccgttagggtcgtaacctatccataccttgcgattgcccagcgggcgcggggcgtaagggttccagtcaggccagatgccgctgtaaccgtccacgccgcagcctatcagcgcgttatagttaaatgccctttccccctgcttcacgaagatgcagcgatacaggttatcgaattcatccggactgttttcgttctggatctcttccaggtcaatcagcgtgaatccctgatcgataacgtcatgcaccgtcacaatttgacgccagatattgtccccgcacagctttccatccttcagtgccttatggctaaggtctaattccgccctgtctttcttgcctcgaccgctgttgaacaggttaccagaccagaattcataggcttcatgctcttcgctggacggcgttgagaaataggtacgccgcaagccgacgtgcgtcgccatgcctgccgccacttttcgcaaattcaggaagttagcgacccagaacgcctcatcaaaatagaggtcaccggtataggattgcgcgctggccgccgaggtgccgagaaaatacagcgtcgccccattggataaaataatttcatccccgcctttcagctccacgccaatactgcgcgccagaaaaataatgaatttcttgaactggaacgcctgggcacgggaggccgacaggaaaatctggttcgtgccggtttccagcgccctgagcagcgcctcgcgtgcaaagtaccaactggccccaatctggcgcgattttagaatgaagcggttgcgcaggttcctttgcttataccagcgcttttgatgttcatagagcgactccatcaccagggcgcgcagctcggcaacctgctccgcgctgaagtggtttttaggtgccttctcctttttctccagctgcttttctttgcgctcatcgcgcgacagacgggccatttgtcgcccgagtaaatcaatcgtcttgtagtcctgggcgcttaagtcctccttttcaatcagccgcagatagcgaacctcggttcgctccaccgcacgttcaatgaacgtggcagcgtcccaggcgtcgcgccgacgccaggaataaatcgtgttggcactcaccctaagccgctgtgcgatttgggggatgctgtaagcctgccagtaaaggcttttggcttcgatgcggggatcggtcgtggttttcatgagtacaggctatcgcgcccgcgaagacgggaatatcactggagattgtcgctggccgctgacaattcctatgtgtggcatgcatttgccgggcgattgaatataggggaacagggtgaaaacaccactaattaaccggagtttgaacgatgccaaagtctaagtttttccgcgtggccgtagagggtgcgacctgcgacggacgcacgctggaacgccagcacattcaacaaatgggtgatagctataacccgcaggtttatggcgcgcgctgcaatctggaacacctgagaagccttttcccggatagcgtgtttcgtatgtatggcgatgtgctggcgctgaaggctgaggaaatcagtgacggcccactgaaaggcaagctgggcttgtatgcgcaaattgacgccaccgacgagctggttgggttgaacaagtcccgccagaagatttacagcagcatcgaagtgagtccgaagtttgccgataccggcgttgcttatctggtggggctggcatttacggattcaccggcaagcctcggtaccgaaatgctccagttctgcgccagcagcccggttaacccgctggcgggccgtaaaactgatccctcctgtttcttcaccgtcgccgcagaagtggctctggaattcgaagacgatgcgccagaagccaaccgcggaaaaggttttttcaacagcatcaaagagctgcttaacaaagggcagcgtcagttctcagctgaagcctctgagatccgcgaagcggtcgaagtggtggcacagtcgcaggcagatacgctggaccgccttgataccttcagtcagcaattagacaagtttgccgacgctgaggcgctgaaaagccttaaaggtgacctggccgacttgaaggcgaagctggaaaaacaggacagcaattttaaccagcgtccaccgtcacacggcagtgccaacggtgccgatcagacccttctggctgactgctaagaccgcaagtcattcaccgaatttgagcgtaaggaaagatatcatgaagaacgaaacccgcctgaaatgggaccagtacaaccaacgccaggcgcagcttaacggcgtatccgcgcagcacgtggataaacactttgctatcgcgccgagcatttcgcaaacgctggaagacaaggtgcagctgtctagcgagtttttgcaaaaggtcaacgtggtcggcgtgcctgagcaggaaggtcagaagctgggcctcggtatcagcgggccggttgccagtgcaaattccggcaacaccgaccgccgtgaaccgcgctccattcttaccctggacgatgacaaataccgctgcgaacagaccaactacgacacctatattccgtattcgcagttggatatgtgggcgaagttcccggactttcagcagcgtattactaaccagatcatcaaacgccgcgcgcttgaccgcatcatgattggctttaacggcacccgccgtgccgataagtcggatttaaacgccaacccgttgttgcaagacgtcaatatcggctggctgcaaaagtaccgcaccaacgccgccgcgcgggtcatgaaaaacgtgacgctaaccagtcgagacgaatccaacaaaatccttgccaagggcctgtacagcagtctggacgcgttggcctatgacgcaaccagctcgctgctggatgaatggtacaagtcctcgccagatttggtggtggtctgtggccgtaatatcgtcacctcccgcgagttcccgctgattaacggtatcagcgagaacaacccgaacagcgaagcgctggccggtcagctgattttgtcccgcaaacagattggcaatatgccgacctttgtcgcgccgttcttcccggaccacgcgatgttcatcacctcgctctctaacctgtcgatttactggcaggaagaaaaacagcgccggatgctcaaggaggagccggaatacaaccgcgtcgcgacttacgagtcgtcgaatgatgcgtttgtcatcgaagattacggcttcggctgcctgattgagaacatcacctgggcagacgctgccgccggtggcgcgtaagtcttaacaccatgccggggaatgctccccggccttcgggggaaacatcatgctgacaccggcaagaaagcatttcgagaacgtcatggcgcaaaaccgtggcaacggggccagcacgctggctgaccagacggcctatgagcaaatcctgcaccggctgcgcatcgaccagaaccgcctgaagggtattcaggcaaacagggccaaggccgaagaaaagcaaaaattgctgcctgactatcagggctgggtagacggcacgcttgccgccgacagcggccaggcagacgacgtgctgacccgcgtcatgctctggcacgttgacgccggaaacattgccgaagccttgcgcatcggggaatacgtcattcgtcacaagctggcaatgcctgacaaattcaaccgcaccgccgccgtgacgctgattgacgaaatttgtgaccccgtgctcgccgcctttaaggccgcacccaatgtggcgacggtgaatgtggatttactgaaggcgctcgacggtctgacggccaatgaagatgccccggaagcggtgcgcgccaagctgtggaaagccatcggttacacgctgcgcacggcagaagccacccagctagaggccctggaatatctgcaaaaagccattgcagaattcagcgacattggcgtcaagcgcgacattgagctgcttacgcgactgctgaaaaaggccgagaaagaaaccccgctaacggatgaatcggagattaagcccgaggaaaaaccggagccggagcctaaggcagtacctgcaaaagcgaagcgccaggcaacagcaaaaaagaacgccacggcgaaatctaaaaagccagcagccaggaaaacggtaaccgctgctgagtaaaagaatgtgccccgcgcaccagggcggcacggcggaagttctcaacctcattgtatgacttcatgccgtccaccgcccgacctgttgagagcgaacgatgagcctggtagccaaagcagcaattaacccctcgaagggaacgccaatgacatcaacgacggcggcgcaaaagtcaccagcggccccttttggccggaaatacgcctggctgacctgcgtctcaggatgcggcttaacggcctggtcacgactgaccggctcagtgagtcggccaccgaggcggtggtttacgtaaacaagcagctggctgactggaaattcaaccaggcaggctacgccgcccttgaagacgtgcccgcagaggtgattaacgacacaacggtattggtttttcgctatcgacgcgccgtgtattccatcgccaaggcgctgttaaccgaaggctatcgggattttgacaccacggcacagggtgaaaagcatgcccaggcgctgacctcgcagattgacacgctatggcgagacggtaactgggcaatacgcgatatccagaacctcagtcgcggactggcggagctggtctgatggacgtcaaggccttgcagggggatacgctggaccttgtgtgttatcgctattacggcaaaacggcgggcgtgacagaggccgtgctgagtgccaatccggggctttgcgaaggcggcccgttacttacggccggtcaggttatcaccctgcctgagcttgccgccgacacggaaaacaaagcggagatagtacagctatgggattaagcatggagcgcctgacggcctttctgtcttacctgccttcggcgtttctgaccacgattgggatcgtgtcactggcgcagtggtcaatgctggcggggattgttttaggcgtgctgacttaccgccttaacaaaagccataagcggcgggtcgagaaggaagaagaaaaacgcacggccattcttgaagatctggcagccagggcgacgcagcacaacatgaatgacgtggtgtgcaccctgcaggatatggcacgtactgaaaagaggcggtcaacgccatgagcataaagaaaaaagcagtaacctgcctcgtgacggcaatcatcgcgattgtaggcgttaagtacgccggacaggtgcgcaccagcgcacagggtctggccctgattggcgatgcggaaggctgtcggcgcgacccttacctttgcccggccaacgtactgacggcggggattggctcaacgtccggcatcaatatttcgcacctatacagtgatgcggaaatcgccgcgatatgggtggaagacctgcaacgcgccgagcgctgcatcaataaaaatttccatggcgacgagatgaaccagaaccagttcgacgccatggcgtcagcagcattcaacatggggtgtcttggactgatgtggtttaccgacagccggggcgtgcgccagcgcaccacaatttggaagcatgcacaggcccgcagctgggcagctatgtgcaaccgcctgcccgattttgtgaacggcggtggaagaaaactcccagggctggttaagcgccgcgaggccgaacgtgtgatgtgcctggagcaggtgacatgatgccgttcaggctgtcgccgctgctgctgatgtcagttatcgccgtgctggccgtgctgaccagcgggcttctgtggcatcgcgcggctgacgcaaacgaggcgctcaggcaggcgaatgcgcggactgacagtaccgaggcggtgattaaaaacgcgcagtacacgctgaatatattcaacgacataacgcaaggccgagccgatgaaaaagaacgtgacaggcaggaaggtgaaacgcgccgcaccgcgctgcgcaatgatttgcagggtgaccgctgcgctgtcgtgtttgtgcctgctgctgctgagcgccgcctgctcgaccgtgcagcgcgtgaccgtgcccgcgccgtgcctggcactaccggcggaaatcctgcaacccacgccggtgccctacccgccgttaagcggtgagcatctgacctacggcgaaacagtgatatgggccgatgcgttgcttgacgcgctggacagtgcaaacaaagacaaggccgccgtcctcactatcgaaaaacggcgaacccaaacgggagggcacatgttaaaggctgaattactgcgcgcgcaaatcgtcgcccacaatcaatttttccgtgaaaaccctgaccaattagaggtctacgtcaaaaaggcgcaggtgatttcaaccggcaggccgtcgccgtcgttcacttacgtgtatgacctcaacgtgttggcgatggattaccccggcaatattgatgatctcaccctcccgatactcgcctgggcgtatgtccatcagccggagctgctgtttaacccggcaaaacgtgaagacgggattggcttcgaggcggagatcctgaataacgataccgccgatatcttgtatgtcatcaaggccagcgaattggtcatcgtgactaaagaccctgacggcaaggtgacggtcacacaccgcgaccagccgaggcattttgaagacgagccaggaaatcagtggtcggaaatattggtcaaggccgctgacggcgatgaaataacgctgccggagggtccgtaatgtctgagacccccttatttcatgagcttgacgcccttttgcgtgacgtcgtggggtgacaaaaccgactacgcgccgcgccatggcccggcgtatcgcgggtgaccttcgccgtagccagcaaaagcgcatcggccagcagaaaaaccccgacggcacggcctttgaagcccgtaaaaaaaagacgctgggcacccagggcggggtcagctttatacgtgacggtgaagtcaggcgcttaaggaactggcgtcacagcaaggggcgctacgggacagaatgatcaccggctttgatgaagaaaaaggcggcattcgatcctttctgcgcgcggacattgagcgctatctgagtattgatttagccaggaaaacaacagcaaaaacgtcaaagaatccgatgtttcgcaagctgcgcgccgcgcgattcctgcgggcagacgcttacccggatgcggtcgtagtgggctttaaagggagtgcggccaagattgcccgcgttcaccagtatggtctgactgaccaggtcgctcaccgagcgagcgccaagtatcccgcgaggcagttgctgggcctgacggagaaagacattgacgccatcgctgacgccgtattcagcgcgctagagggagcaggacaatgaccatcgccgagctgtacagattactgatgaacctgatccgcgttggcacggtcagcgaagttgacacggtgaactacgtggcaagggtcaaaaccggcgcaaatgaaaccgactggatacgctggggcgcgcagcgagccggggacagcgtgacgtggtgggcaccttcggtgggcgaacaggttgtgatcctttcgcctggcggggagctggaaaactcgtttattgcattcagcctgtacgcctacgatgccccccgcctgatccgggcctgacgtcacgcgtcaccacatacccggacggtgccagggaaagctatgacccagccagcggcatgcgtcggtgcgaaggcattaaaggtgcgctgctgtcggccagcggcacactcacccttgaactggcgcgcctgatcatcaatgccgaggtggtgattaatggcgaggttatccagggcggcggcgcgatgagttccaacggcatcattgtcgatgcgcatggacataaaggggtcaaaaaaggcgatgacatttctgagggccggtatgagcagtaactggaaaggcatgaacagcacaaccggcaaagcttgcgaggatgaagcgcatctgcggcagtcaattgccgacattctcatgacgcccctgggaagccgtgttatgcgcagggaatacggctctgctgtaccgtcactgattgacgagccagacaacgacgtcacgcgcctgcggttgatagctgccgccgtaatcgctctttggcgctgggaaccgcggataacgccctcgtctgtgacttttgcacacagtgaacaaggtgcactcaacatgcaaataatatcgcagcgcagtgattcgttaagcgctgttacaaccgatatcacgctaacgggaggcgtatgagtgcagtgattgatttatcccagctacctgcgcctgaagtcgtggaaacgctggactatgaaacccttttagctgccagcaaagcccggttggttgcgctctatccagcagacgagcaggcggccattgcgcgcacgcttaccctggaatcagagccgattgtcaaaatattggaagaaaacacctaccgcgaaatgctgttgcgccagcgcgtaaatgaagccgccaaggcggttatggtggcttacgcgatgaatacagatctcgaccagctggccgccaacaatgacgtgcagcgcctggttattacgccagccgatgcgcaggctgtgccgccggtcgcggccgtgatggaggctgacgctgatttgcgccaacgcatccccgccgcctttgagggcatgagcgtggcggggccgtccggcgcttatgaatatcacgcggccagcgccagcggactggttgccgatgcctccgcgaccagtccggcaccggctgaagtggtggtgaccattttgtcacgcgacggcgacggcacggcctcggctgaattactggcgacggtaagcacggcgctcaacgacgaagccgtgcgcccggtgggcgacagggtcacggtgcggtcggcggaaattgtgaactacgaaattgtggcaacggtatttgtttacccaggtcccgcgattgagccgattttagcggacgcgaaggcgcggctggttgcctatatcaacgaacagcgccgcctcgggcgcgacattcgtcactcggccatttacgccgccctgaccacgcagggggtgcagcacgtcgagctgacttctccgcctgctgacgtggtgctgaataagacgcaggccgccaactgcacggcctacaccattacgtcgggcggctcagatgaatgatttgctgccctccggctccacgccgcttgagcgccgcgtggccgaggcctgcgcgacggtcagtgacctggccgtgccgctgcgcgacctgtggaacccggacacctgcccagtgaatttcctgccctatctggcctgggctttttccgttgaccgctgggacgagaagtggacggcggcagagaaacgccaggcagtgaaagaggcgttctacattcaccgtcgcaaaggcacggtagcggccatccggcgcgttatcgaaaacctcggttacggcatgacgttaacggagtggtggcaggtcgctgaccccgcaggcacgtttcgcctgacgattgacgtcaacgagataggcattacggctgcgatggtgaatgagcttgagcggctgataggggatgcacggccggtcagtcgccctatctcacagcttgccctgtcggtgaaagtcgcaggcgtcgtcagcgtcggtaccgccctgtatgacggcgatattctcacggtttacccgccggactatcagccggaggacagtattttttatgacggcatcgcccatcacgacggcaatgttatgtattcggagaaagcagaatgacgactatcacagaggtgccgtcgtgggatgaaagtattcatcaaatccagcgcggcgaacgcgtagagggtggccgcgacggtgtcgccaatatccaggcctcgcagctggctaaccgcacgcgctatttaaagcaggctttacagactatcccggattatcgggagtttaccttttacaccacggcttcagaccctgatggcacgattgccgggcttgccgccacacgctcgggccaaacgttcagagtgggccagggcgtcaatgcggacatcggttttacgtattactccaacattgaggggaccgccttcgctatcgcctctttcgccggtaaggcggcctacgaccggcaaatacagcaggaggacagagactggcgcacccaaatgcagttgcagcagcgcgccgccgatacccagcgccagcaggagagcaccgagtttaatgcctggtacaccacctgccagagcatggcggataccttcgtgaatgcccaggaagcgcgccttgatacgttaattctgaatgccgaggacgtgccgctgggtgattacaccacggggccgctgacccttaaggccgcgaataacaccattacgcatggcggctacacctacaagcccaaagccagcacggcgctgccttttaccaccacgggcaatacggaaaacacgtgggcgcaggacgccagcaagttccgcctgatgagcgatgccaccttgcgccaggcgctgggtacaacgtcgggcgcgacgaacatcggcctgcatcacggcacgcttgacgatgtgattggggacgtggtctcggtcgagcagtttgccgtcgccggagaaaccacctgggaaggggccattcagcgcgcctttgattgggcggtcgcgcacggcaaaacccgcatttggggaccggccgtgtacgacgtcaaatcgaccattttctggcgcaattccggcgcgagcaaaatccgtctggagctgggcgggctgcgggcaaccgatgcctggccgaaaaataccaacctctgggacgcgacgccgtttttcaagattggcgacaataacggcaacattactaacttcgagctggtcgtgggcgtcgtggatggcaacgaccgcgccgacgttattcaaaccacaggctacggtttttcgctggcgctgctcgacatcggctatgcgcacaacaatgtttcggttatccatcttggcggccagaattttaacaccggctcggtggatgccatcggcaaaaactggtcaggaaactggctcggcgcactgattcagaacggccagaatgcgtccaatgccatcgccgaaggatggcgcattaacgtcatgttcaatgcggcaaacaaggtgggcggcgtctggttccgacgcacggggcaatatggccgcgtgcttggcagcatggactacaacggcacgtcactctctgtcgtcaagctctccgccgtcacgggccttgatgataccggcaacacgcgcgggctgcgctgcacgaacggcagcgcctccgccgagttccttttctattacatgtatcacgggtcgctgtatgtggtgttgctcgaagacgtcgacgtgcagattaaccagaacacccataccgggcgcggcagttcgttcaagccgggcgaggtgctgaccttccctgatttgccgggtaccacgtttaccgtcgggtccgtcacggtcgcgggcgataactacgcgtatgcgaactacttcgacctgctgcacgatttccagctggcaccgtttggcaagattgacgtcaattgcggctacatggcgggcgttatcggcggcaacctgcacagctcccgattcttttattacaacgtgttcgacggcctgaccgataaatggaatggcctcacggtctcccattccggcagcaccttgtcgttgtatgaccgcgtggcctctgatgaagcatttttaaacgtcactaacgattacctgaacatcaaccgccgcctgtacatgggtgtgcacaaaatcacggggtttgagacggtggtcggactgaagcgaaacagcggcgcggcgacgccggtactgaccctccaggatacctcaacggataaatatggcccggcggggtcaacctaccacgtggagtttcagagtacgtttagcgagaccggcggcagcttcgacgtgatgattatcggcacgcaggtttacgtgaaaaaccgtaaatggtacggcgtggcgctgtgggaatggtgggagcagctcagcgcagacggtaattctgtcgtcggtgccgagctgcgcatgcgtcaggaaacgcaggacatgatttatttcacgttgaccgtgacgaggattggctgatggcgattgaacccagaaaacttttcagctcttacgaatatcttgagccaaccagcggcactgaatttgcccttgaaacggtggacggcaaacagttcaaggttgccaacgtcatggcgcgcgcattgaacaagggcaccacgaaggaagtgcaggcggtgcttgaaatcggtcagcgcatggtcgaagtggcgaccgagacggcgctgggctcggtggttcaggtcgtcaatatcgatgaccttgagcttaatcagcaggatgacgggagcgtgagcgccgaacaggccagccgaaaccaggccgaagccatcaagcgcaataacgtcgccctgaatgcgctgctcaaagagtggcacatcctggttaactacctcctgaacaatcgccagctggtgcgcgcaccggtttccacgaacaccacggcaaacgacaacgcatcataaggggccatcatggcaatcacaggaaaatacagtttcaacgcgtacctgctggatgaggcctatgccgtcattggccgcatgaatatcagcgagtcgtcagcggtcgtttacttcaacgtttacgcctcgctgtcggcgtacacgatgggaaacccgccggtgtctacggtaccgctgccgatgcgttacgcctcgggcgacattcccattgaagcgtttgaggcacaggcgctcaacacgccgatatttgagggttttgaaaaggtcgccacggaggcgattgcgcgcagcgaagcgagtacgcaaagcctgggtgcctcgatactcccccagaaaaccgatgaaaagacggcgtgattttattatccctctgccctgcggcccctgtcaacatgccagggcgcgcgttgctgaatgttgaagacgacagactgaatgtaagaaggtgagtatgagtgacaagcgatttaattccgtgctgacggcggcgggtgaggcaacgctctcgcaagccatggtgagtggctcaccggcgggattgacttttatggccgtgggggatggcggcggcaccgtgccggtattcggttcaacgtcgaccggtttaaaacgcgaagtgtatcgcgcctacctcaacagccttaccctcgccgacggtaataaaaacatcgtccaggccgagatgattattcctccgcaggtcggcggattcactatccgggaagcggcaatttatgatgcaaacggcgtgtgtcaggcggtggccagcgtgccggagacctataaacccttgctggcagagggggccggacggcaccaggtgattagaatttggctggcggtcaacaacgcggccagtgtgcaactcaccgccgacccgtctgtgattgtggcgacggcaacacagttaaagaaaacgcaggacacggcgaaagactacacggacatggtggcggataccgtctctacccaattaacccgtgcgataaaaaaggcgcaggatacggcgcacgactacaccgacaccgtctctgaaagcttgaaagcggccattagcgacgcagtaaaaaccgcaagccgcgccgtttgggaagacgataacccggtagggactgtgcgattctttcagcagaaaattgacccgaacgcgaaatggccctggtctacctgggtttacctgggcgaaaacaaaacgatccgcctgggaaaacaggacggcagcgacgtgtttaccacgggcggcgcggacagtgtcacgctcacaaggggaaatctgccgaacgagcagattgacgtctcgggtacggcggcggctactgacctgggaacaaaacaaaccacccccgccggtaagcacggccacgacggtaaatttacagagagcaataccgctcttgacggcggaagctcagaccgtcgcagctggtcgtcaaaagccagcccaaacaacgaagacctgatccaggccgcggacgatcaccagcacgacgtggtgttaggcccgcacgggcatgacgtaagcggaaagacagcggcattaggttccggcagcagcattaacatcaccaacagcttccttaagttgatgggctggtatcgcagtgcctgagttgtattagctcaagattgacctaaaacaactacgctaaagaacctaactcgacaggcagctcggtgccaatagcggacattattcatacatcaatatttttaaaaaagtttatactaacttagtctgtatatcagtcatggtattaaatattagagtaaagagcatttaaccagtaaaaaactaaaatttcgcttaaatgaaacatttaaaaaaaataaggagataactttgtcaagtaatcgtgatgatttctcgcctgcaaccaaaagatccctcgcagatcgtgttggctggatttgctcatacccaaattgtgggcaaagtactttaggacctgattcgcaatcagaagaggataaaataaataatgggatagcagctcatatctgcgctgctgcgccaggagggccgagatatgatgcatcgatgaccccagaaatgcgcaaatcgatcagcaatggcatttggatgtgccgtaatcatgggaatttagttgatgcagatcatagccagtatactgtcgaaaagctgatagcttggaaaactgatgcggagtcagcagcttataaaaggctatctcagcctgcgcagctcctaacgatcgggtattcatctcgtgacctgaatacacttaaaatctattgtaacctatttaattacgaatacttacagcaactaaaaaacgaaccatttagagcgaaagtacctacaagtattatcgatcctttacatacctgcatgaattatataggcaacccaagttatcaattcaatgcagctgacttggaaaaattaaggcaagaattgaatgcaaaagttcttgattttaatcgtcactttggcgcagagtcaggaggtaacataggttattatgattatgtagatttaaatttaattaggcagagaaatccaagtcgtgtagagcactatgtgaaatatattgagagcacgcaacaactcgcatatgaaatatctgaggtggcactaaagctcttaaccattcaagccgaaactggaaatatctaaacataaattaatagtttaaacagcggatttaaccaaaatccgctgttcgctcaaagcagactgcaagatttgatgatattttaccggcgaacctgtcagatcaaatcttatctaatgtaatgagtcataaatcaatcgctgcagcaacgtcatgttcgactatgctacagcgcttttataagtgctaaatgggttacatcagggcaaggatgtcatctgcggtaatgccagccagcttctcgcggatgtcttcgctgacctttttcaggctcaatgtaaattcaattttctgcgccttgccatcgcgcatgaattctgtcctgttctcccgaatattggcaatcacgaacatgccataaatcgtgcccgttccctcaatgaggggccacggcttcccgccgtaagccatcgtgcgcaatacgcttagcgagacgtcaccgccggtcacttctggatacagcgtacccgtgagcgtaatgttgtcttccccgtgccgatatactgccaactggccgattttccaatgcgatcatttttaacgtgccgccaggatgtgtcttgctccagtgactggtaaggcgcagttttgagcataaacacgaacatgccataggccatcatcataatttttactccctgtctttgagttgggaacgtttgcggttatcgcgttctcgcagcagtgcagtcaattcacggcgcacggttgccgcgatctcttttgcatcaggcttggcgctctcatagaaatttaatgtcagacttatcggctcgagcgcgttatcgagcacagccggttgtgactgtgccgagcgccccgagggaaccggaataccaggcagaaatgactgtgttggccatgcggttaacttcccagcgatcccgcgaactgccgaccctattcggtcgcccatcgactgcgccggacttcgggtggctgaaatcctcggttcattgtaagcgccataaaccgacatgaccggcgggtgttttttaaagacgatatcacccagcttatctgggtctcgtgccgccgcgctgacggcatcagccgagccggttccctttccctttttcgtggtgttatgcccgctaagctgcgctaacgggaccggagacacgggcgcaggggctggttttggtggcggtacaggcactacttttggcgtattattgccagtagtcgagacgctaccgggtggcgaaggctcccaggcttgcgggatcatctttttaagcttgctgtcccaaacgtacataaccggcgctttagcctgcggcgcaacggtatccatggtgtttgcgacctctttcgccgcgttggccgcttcaggaatagcgcccagttttttaagcagccagccgatcccctcggcgactttaaggataacgtcgaccacgcccgatacggccttgccaacaacctcaccgaatacccgtccagcctctgtgcactctttcagggtttccgctgaggtactgaccggctcaaacagctgggtaaaccagttccacacgcggccaatagcattacctatgctatcgaagatgggtgccagcggcgcgaacgcctgttttactggctcaatggcgccaacaaaccccgtccagaatcccccgaagaatgtttttatcggttcccagtatttccagatcatgagcgccgcaccggacagggcagcgaccagcagaaatacggggctaagcaatagtgagaggccaccgccgagcacggtcagcacgctgcgccccacggtgaggagtgtgccaaaacctgatgtagcaagcgtgcgcaggccattgcccagcgcagccagtgcggcaccgggtgctgtgaaaagcattctcagtgccgagcctgtggcgctgcccatgcgggaaacaacgctcaggcctgttttaccgatggacagaatacgcgtgccaaactcagtggcggccgtcgctgccgagcggaacagcggccccagtctttaacgctgcgccctgaactggacagcaacggagcaagtcgcccaaggcgagcggtcagcccgctgagtgaaggtaaaagaccgccgaaaccgcggccaccggtcaggagtgaaaggctcaggcgcacggcagccatagggagcagaatgctggcaacgctcagggcaagtgcccgagaacggcgatggcgacgcctacagtggccgccagtttgagcaatgtcccaacaagcgccgggttagcttcagcccaggtgcgaaagcgctgaatgatatcgcttgcgtactgcatgacctccatggccgggccgcgtagcgtctcgccaagggagctaaaagtattggttaaactggctttcgttgtttcccatctggcactgacagaatccgagttgatatctgactcacggcgcatcgagccttttgcagcctcactgttaaccagctgcaactggcggtaaagttcaggaaggttgcccatgagcttgcctgcctggccgccaaattccttgccaaaaatctgcgtcagtactgaatcgcggtcagcgtcaggcagttttctcacctgttccagtacggtgagaatggtgcccatcgcatccaccgacatcgatttttgaaccttctcggcgctaaggcctatggcgttcaaccccttcatgaaatcgccaccctgctgggtcgcaatcgaaagttcacggaccatggcatgtgtggcgctggccgcgatttcaggcacggcacccagtgtcaggaaggtggaggccatggccgccgccttgcggaagtccagtttgtcggcgtcgcccccgatgcgctgaagaacatcgatgatatccgaacctttggacttagcattatcgtcaaggtagttgagcacatcaccgagctgttcaatattctgggtgggaactttatacagcccggcaattttacccaggctttcagatagctcgctggccggaagctcaaaggcgacagacgccatggcagcagtgttggcaaaagacagcaggtcttttttctgtttgtcccacgggtcatcgccattggcgacgcccattctcgcgccaccttcaaccagtgcagcgtaatcaatagcgccgtttggcatggggagcttttcactggctgccttgatcgcctgctgcatctcataaaattgtgaggtccgggtaccgtcgttctcccgtaagccattaacctgtttcgcgacccctttcatggagttttcaaaatcggcgtagctttttacaaggccgagcacggggcggtgatggccgcaccggtagcaacggcgcgtatgccgccgctttccagcttctcacgcgtttcctttgcccggtgatactgctgctgcgcacggttgacggcggtgagtcgccgctgctgctcggccagttgtcggttatattctgctgtttttcggctgatttgctccgtcgcgctgccgccgccccggagcagcacgccgttgtgcatgagcgacgaacgcagcgcaccaagcttggcctgctcctcgttgcgcgcgcgggaaagttgccggacggcatccgactgttttttgagggccaccgtctgttcatccgtgcgctgtttagcagggccaaacgcagtgcgcagttcgtccgcttttttacgggcttcggcaagttggcgcgcggtggtttcagaagctttagacaggcggtcaaaactgctggcctggcgttcaaggcctttcaggctggtttgcgtggatttgatttgggatgccagcgaggcggcgcttttttgcgccgcgctcaccggacgggtgatgttattgatcgcgctgaacgcgacgcgaatgctgaggttacgttctgtcattcttcctgtccatttcgtgccaacgcacgcttatgccaggtcagaaattcactcactggcatcacatcgtaggttgacggctgccagtgaaaaacgacggcgatatcggcgataagttcgtcagtatcaaccgccggacagcggattagatttcgcccgctgctgtctcgctctacgccgagggcggtgccaaaaaatcggcaataccggcggccagctgggagaggtcctgcacgttgagctggctcacttcaacttccgtcagcgacgggctggtgacgcgcggcagtagcttaatcagcgaatccacatcactggtcatgacgtcgtaaagtttcaggccgcgcagagagccggtctgctgcatggcttcagtaatggtcacttctttgatttcggtcttgccgcgtaccacgggaaagcccagggtgattgtcttttgcatggtttatctctcagtaaaccggcgcagcagttgcgccggtgagttaatagaaaattacagtccgatattggcccggtgctgctccatcatgtccttgccgcccacgttccagaccatattcagggcgtcgagttcgaacacctcttcgccgttaatggtgattttcacgtaggtatttttcagcgagtacttatgggaggtgttatccccagatttggcgctgccccagtccatttcctgcacgcgtccgcgcgtctggatctcacagggaatagcgttgccggtcgagtcgtccaggtacgaccccgcaaagcgcagctgcacgccgtcaatggtgcttccgtaggttttgataagctgagggtcaaggccgcctagcgtcatttccatgtctgccgcgcccgtttcaaagcccaggtgaaccgagacacccatcggcatacctgccccctgatagtcttcagtcttgcgcgacagtttgggtgtcgtgatctcttcagccttgcccaggtagctgttaccgttgacaaagacgttgaacgcaaaaagtttacttggtagtgacatggttgtttccccttagcccagttggtcgaacacggcaaagtattcgtccgtgaactcctggataagactcagattttcaagcggcggaaccggcgtgtatttataacgaatggtcagtttcccgttgctcagtgtgtccgccccattatcggctttgtcataccagcaggcgaaaccgaggagcctgccggcggtgaccagcgcggagcctttgcgattgatgccgtcaacgatgtccttcgccagggacggggtcagcgttttatcgatgtaggcaaaatgcgcctcggcaacggtatcggcgaggatttgcgcagtgcgggtgtaactttcaaagataaacgtctcggcgtcacaggtgcgtgaaccccagaagcgaaagccgtcacgcttaatcagcgtagtaatgcccttactgttgaggtcatccgcgtccgtgtcggtgccctgtagggtccaatagatatccgcagaaatacccagaacgttggacacggcaacgtttgacaggactttgtgccaaccctggtctgcgtcgattttggcgcgcagcccgaccgcataagccggtgacggcacgacgacgtttgccgcgacctggctgtcgtaagcaataaagtcagggtaaatcaccatgacttcgcgctcgctgaaatcttcacggtaggccttagcttcggcaatggttttacagccgttggcggcgacataagtaaatgcccgcaacttctcggcgatcaccgccagttgaaggcccaccggcttggtgtccaggccaggggcagccagaatgcgcggacgctccccgatgcgaggttcggcagtcagcaaggcaaacaggccggtatagcgtccatccgcgcctacgccgccgatagtcaattggtcctgcgtagtggccccgtcgcctttcgcctgtgccacgcgaacaacgacaaccttcgggctagactggtcagaaatcgccttaaggaccgtgtaaagcgtgccggttttacccgatttgccgaggtaatcgcgtactcgggtgagcagaacgggggtgttgagtggaaacgtcgtagcgtctgcatcatccgccgtacagataacgccaagggtggcggtatcaatgtcgcgaatgggcgtgctcaggtcagtggtttccttgaccgaactgccgtgatgataattatccatgcttttcttgcctctgattgatgcgtgcaaaccatcatcaacccgcgcaggcttcttttcacgtcgtgccggttgtcgctggccgctgacaacgcttagcggctgacggcgctcatgcgcgcgagcgaggatactggcagggggatttatgctgactattttgaatgaagatttatccatgcagcccgatcaccggctgtccattgacggcgtcgtactgaccgcgctggatgaaaggttgatgtcgttgtcactcacggataatcgcggctttgaggcggacaggctggagctgaccattgacgacagtgacgggctggttgttatgccgtcaaagggggcgaaaatagccgtggcgattggctgggccggtaagccactggttgataaaggggtgtttacggtcgacgaaatcacccatcaagggccgccagacaggctgattattgccgccaggagtgctgattttcgtgagagctttaacgtcaaacgtgagtacagctggcataacgtcaaagtgagtgatgttgtctcggccatcgcagggcgttatgaccttatcccggcggtaagcgcgtcactaaaagatattgagattgaccatgctgaccaaacgaatgagtcagatatcagttttttaacccgcatggccgaaatgctgggcgcgattgcgaccatcaagaacggtagattactttttatcgtgccaggcatgggggtgtcgcaaagtggccgtgtactacctgccgtcatgattactcgcgtatcgggcgacgggcattcttttcgtatcgcagaccgagacgcctataccggcgttcaggcttactggctggatctgaattttggcaagaaaaagcccacgacggtgaaacgccgcaggaagaaaaaaacggtagctgttacccctgcgtcaagcaaaaaggaaggggattatatggagggcgcagagggtaacgtttttatcatgcgtaaaaccttcaagaccgagagagcggccaggcgggcagcggcggcgaaatggagagaattacaacggggtgcggcggagttcagcattaccctggcacgcgggagagaggatttataccctgaattgcatgccaacgtcagcgggtttaagcccattatcgaccaggcagactgggtcattaatcgggtcacccattccattgacgaaaacggattcttgacggtgcttgaactggaagtgaggttaaccagttgggatgatgcagaagaggacgacggggaaacagagtagattaatatttagacttatcttaaaataagtttaaatgaatcagacagcggtggtgtctcatgtttacctgtccaaagtgcggcgcaagcgctaaaacccgaacaagcgtgatgctgagtaacgaagtcagacgcagctaccatcaatgcaataacctatcctgtggcagtgccttcactacacttgatgcggtggagcactttcttaataacgtgctgcccatgaaagcaagtgccatccccaaaggtctatttcctaactcaaattacggcgaagaccagcttaccctttcgttatgaagcgctattaatgccttgaaatctggggcattaatttttttgcataatagtcactcatctgacttaatttaatatccagaagatgtctggcaaatgaaagagtaaaagcccctaagaaggggctttcttttgtaagcgtggtcaatacgtggacatgcgtagaaataaatccatttatttcatggttttacaataaaataattagcaccttcgggtgctttttttatgccttgagtatagcgccgttaatatcacccatcgggtaaaaaactatttaccccaaatcactcccgccaaagataaataacaaatcctattaggcttatgcattttaaaataacaaaaatcatcaacaaacctcacagaatataattttattgaaagcgcaactgttagtccttcgacctgtaattgcccaaaaaactgtgatttgcatcacaaaatatgacaacattgaaattagctgttatagatattacacagtgagaaacagaccaaaccctttggcacgcctgatgccagcacgcagggcaagggggagagatagcgttatcggcctctatttctcaccaatttctatcctgattggccacctatttttcccctttcactcttttgcaaggacgtatttgaaacactgaaatcaaactaataaacaaggtacttatgacgcagataaatgaagaaaaaattgaaacactctcagagacgcgagggagcgaaaatagcgctccggctacggttgaaaatagtgataacaacagttttctcagcgcagatgcgtttctccttaccgcaacgggcatagccgccatcgccgggttcctctacggatacgacaccgggattatttcgggcgcgctgctacaaatcacgcacgacttttccctgtcgagccacgctcaggaatgggtgaccagcgccatactcgtgggggcagttatcggcgcactgtgctgcggtaaactctcgagctctataggccgccgctatacggtgatgaccgtcgccggtattttcgccattggcgtaatcggctcgggcctttccgcctcggcgttttggctgggagtggcgcgtatcgtgctcggatttgccgtcggtggagcctcacagatagtgccggtgtatatcgctgagcttgccccgcccgaaaaacgggggcgactggtgacctttttcaatatttctatcggtatcggcattctcaccgctggcctggtcggcgcgtttatgcaggatatctggtcatggcgcgtgatgttctcggtcgcggctatcccggcgctgattttgctggtcggtatgctgccactgcctgagagcccacgctggttggtcggtcagaaacgtatcaaagaagcgcgtgttgcgttgaacatggtgcgtgaaaccgatcgcgaagtgcgccatgaactgcgaaatattcaaaaagtacacgataaagtcgaacgtaaagccgtcgcaggctggaaagacctcaaacagccgtggatgcgccctgccctgtttgccggtttaggcgtagcggcttttactcagctttcgggcatcgagatgatgatctactacacgcccaccttcctgaccgatgcaggctttagccgaggcgcggcgctgcattcggcgctgggtgtggcggtgatttatctggtgctgacgattatcggtaagctcgtggtcgaccacgtgggccgtcgtaccctgactctgtggatgatgccgggtgccatcatcagcctgtttctgcttggcctgatgtttatgctggatagtcatggccagcaatatggctggttgatagtgacctgtctgtttgcgtttatggtgtttaactcgggcgggatccaggttattggctggcttctgggttcagaggtctatccgatgagcatcagggaaaaggcgaccagcctgcacgcggcaacgctatggggctcgaatctgcttctcaccgccaccgcactgtcactggtcaacatcttaggcatcggcggggcaatgtggttctatgcgctgctcaacctgttgggcttcctgtttatcttctttatggttccggaaacaaaggggcgctcgctggaagagatagagacttcactgaaagagggccgcttctacccgcgccagcggagcaaacagcccaaggccgtaaagcaggtcgataaaatcgcttaacgcctgccccggtcgagccttgcgcttgccggggcaaattttcttcaggggtgctgctgcgctaaaaagtccaccagcagtggattatgatcggaagcccgcgtctccagcacctgagcctgtgtcacgctcaacccgcggtagaagataaaatcgagcgggcggccaaacgcccggcgacgcaggtccgcagggaaacgaacctcttgaagcgagatattgctcgcaaaaccgtacaacgcattaatgcgctggcggctccacgcattgaaatcccccgccatcaccaccggacctttatggttggcaatctgttcgcctatagggtcgagctgcttactgtaaacgtcgacaccaatgctgaaattcaccgcgtgaatgttgactaccattaacaggcgaccatccgttaagggatacacggtgattaacgcagactttgacagacgaagcagcggctcccgttcgcgcagcggacagcaatacaccggatgcgcggcggccagcgtcatcaccccagaaggatgctgtggtaaaacaaaggcgggtacctgatcggcagccagaaaattagacgtggcaaaacggataagttcaggagtcgtctgcgcctcttgcagcaggaccaactgcgcgtctttaccgaagccctgcagtacagaaagccagtcagcgcgctgctgtttaaagatgttccataccatgatgcgcaagacgttcgaattggtgagtgccgcgccgggtggcagatcgggtccaggatgtggcaatacacctgggaagatttgctcaaccggctgaccggcaacatacctcattgcatacgtttttttcggcacactgttaacccatttctacccagaatccctcaagataattggaaactggcgatatccatcgtgaatctgctgtgcggaaaatttcccttcagcggtatttcccagtatacgccccacttaaggaagacccaatttgtttacattggtatacatcttgagcttaaaaaacatcaataacctgatccgacatttgatagcaagcccgctggccctgtgcttaaataaccagaatatttagaaatttatgtccgggatgcaacaatgaaagcgagttcagaagagctgatggtctttgtgacggtggtcgagagcggcagttttagcagggccgccgagcatctcgggcaggataattcggtggtcagtcggacgataaagcggctagagcagaaattagacattcagttgctcaatcgcaccacgcgtcaaattagcctgactcatgagggcgaacgctactttacccgggttcaaaaaatccttcaggagatggcggcagcggaaaatgacctgctggagaatcgcaacgaaccacaaggtctgctgcgagtggatgccgctacgccggtggtgcttcacgttctcactccgctggtcgccgaattcactcagcgctatcccaaaatgacgctttcgctcttctcctcggagagcaatatcaacttaatcgatcagcaggtggatatcgcgattcgcatcggcgagttggaagactcaagcctgcgcgcccgcaaactgatgttgagctatcgaagcgtattggcctcaccggcgtatttggaaaaatggggtgtgccgaaaaacgtggacgatctcgccaatcatcggtgcctgggattcaacgaggtgttgcatctcaacaaatggccgctgctgtgtgcagacggccaacagttgacgattacgccatttatctctgctggcagcggtgagaccctgcgccagctttgtctgacgggcaacgggattgcctgtctttcagactttatgatcaagcaggacgttgataaaggcgatctggttgagctgctggtacccgcggtgatgcgcatcgccatgccgatgcacgcagtttattacagcgaccaggccgtcagcacgcgtattcgctgctttatcgacttcctgagtgaaaaactacagcacgtcgaagcaaattaagcatcccactctggcgccaggccttgcggactgaccagacgcccgttacgttcaagctgggcaatctgcgccatatcttgtggcgacaacttcagcgtttgcgcctgcaaattgctttctaggtttgcccgcttggtcgaagacgggatcaccgcataacccagctgaagcgcccatgccaaaacaacctgtgccggtgttgcaccatgttgctcggcaatctgcatgatagtggcatccttcagcgcctcaccataggccagcgtcatgtaggaggttatcgcgatattgtgctggcgcgcgaaatccacgacctgctgattttgcaggaatggcgatagctcaatctgattggtagcaatctcggcggcgcctacggcatcgatggcctcctgcatcaacgccacggtaaagtttgaaatccctatctggtgcgtcagcccttgcttttttgcctcaaccagcgcctgcatcgtttccgcgacgctgacagcgccgttcggcgacggccagtggatcagcgtcagatcgacgtaatcggttttaagcttactgaggctgactttcaggctttcaatcaccgcgccggcgctgagattttcgatccaaatcttggtcgtgataaagatctcttcgcgtgggatgccgctttctgctatggcctcacctaccgcgccttcgttgtcataaatttgggcggtgtcgacagcacggtatcccagcgccagcgccgttgaaaccgagtcttttacaatctgatcttttaaacggaatgtccctaaaccaaaggctggaatgttcatcttaaggctctcttcattaagtgtttattaaacgataactcgcttacggggtcaggaatgaggagagtatggcctctgggttaatggataaaaataacctgattaccataatacttttgactaaaatgcaataatcacgcggattcagaggcagggtaaaagcgttgccagtcgagcgcaggcagcatctcaaggcggttattttgggcgttgacaccccagtgctgtatagcgtcattggcgtcaggcagcgccagcgccgcaaggcaaccctcgttagcggtatggcagagtcgtaaggcggtagattgggacaaaaaggtttttgcatcaggattaagcgccacggcgttcatcatcaaaaccccttcccccgtctgcttcacaagcgcctcgcgctggcaccaaagctgccaaaacgcggtttgcaggctacattgggcattcagccagtcattttctttagcactgaaatattgccgagcgatggacagcaggcttctcctttggcggtcgatttcgatatcgcagcctaccggtccacggtcggaaacggccaccagcagccgatcggcgctgtgactcaggttgaaaaagggttgcacagcgtcggtaaaaaccggttttccgcccgcaaggagcgtcatttccggcagcgtcgctcggttgaaaaccttgaacatcagttcggcaagcagcgctctgcccgctaaaaaggtctcagcgcgtgctgcccccatcccccggcctgtgcgagcaatgcaggcgaaagtctatcccggccaagaggggcatcgagcctaccaaacgcgacagcggtcaccatcgctcttaaggccagcggcggaaaattagcgaggtattaatgccgccaaacgcaaaattattggactgaataaattcggtctcaatgcttctcgcttcgcccatcatgtaatccagatcgccacagagtgggtcaggctcactcagattaatcgtcgggaaaaagcgcccttcgttcatcatctccagcgacatccacgcctccagcgcgccacaggcaccgagcgtatggccaaaatagctttttagcgaggagataggcgttttattgccaaatatggccgccgtggcgtgactttcggcgatatcaccgcgatcggtggcggtgccgtgtgcgctgatatacccaatttccgaagacgggatccccgcctgctgtatcgcctgcgcgatacaagtctgcatggtttcctgctgcggctgggtaatatgcgccgcatcgcagttggtcgcaaagccgacgatctcagcataaattttcgcgccgcgcgcctgtgcgtgatccagcgactcgaggatcaatgcacccgccccttcgccgatcaccagcccgtcacgcattttgtcgaaaggccgtggagatagcttgggggtgctattttgctgactggttgcaaaaagcgtgtcgaatacagccgcctccgaagggcatagctcctcggctcccctgcgaccatcacggtttgatagccatgacggatggactcgtaggcataaccgattgcctgactgcccgacgtacaggcgctcgaggttgggatcacgcggcctttcaggccaaaaaacagccctgcattgaccgcggtagtgtgcgacatcatttgcacataggtggtgccggtgatgttattggtgtgctgctcattaagcatggtggcgaattcgctgactggcttagtgctgccggtcgaggatccaaaggctatccccgtttgcccatgggtaagcaccgggtcgtcgataagtccagcctgctccagcgccaattcggtggcacgggtcgacagtagcgcgacgcgtcccatcgaacgaatgcgcttacgggtgtaatggtcgggcagcacgaagtcttcaatgggtgcagcaaggtgcgtgttcagcccttggtaaatcaaccactcgtccatgtgcctgacggcattacgcccttctagcagcctggcggagacctgctcccagctgttgccaaaggctgtcacgcccttcatgccggtaatcacaacgcgatgaatactcataccatgcccccgttgatggaaatcacctgacgggtgacgtagcctgcaatgtccgacatgagatagctggcaagaccggcaacctcggcggcggtgcccatacgtttgagcggaatggcgcccatcgcggcttcaagagcctgaggttgaatgtcgagcatgccggtgtcgataagccccggcgcaatgcagttaacggtaatttttcgctttgccagttccagtgacaacgctttacaggcaccgattatcccggcttttgccgcactgtagttgacctgaccacgattgccggtaataccggagaccgaagagagagcgacgatgcgcccgccctgccgcaggcttatcatcggcatcacgcagggatgaagaacgttgtagaagccgtcgagattggtatgaatcaccccgtcccagtcgctttccgttagtgcgggaaatgcgccatcgcgcgtaattcccgcgttgttgacgacgccataataggcgccatgttcggcaatatcggcctcaatcacctcgcggcactgctgcctgtctgcgatgttgaaactgagagttcttgcgcatccgccagcggccgttatctgtgctgcggtctgctctgcccccgctaaatcgcggtgatagtgcacgaccagattaaaaccgtctttcgccaactgaatggctatcgcctgcccgatacctttactggcaccggtgaccaacactgaacgcgtcatagcgctgccccctttattaatgtttttaattcttcggtttcaggtcgataggtgtttagcctcgcctgcgcaacggcctgtgtggcggcacgatgcgcattgtcgaggcctgtgttcatcgatatttcgcattcaaagctggccagtttttcgtcctgcaacagcagggtgacgttgaccgtaagcagactgcctgctgggaaggtcgccattgtgcatttcattgcacgcccgccaagcagcatgccgacgcgcggcttattgccattctgttcgccgtgccagccgctccagacgccgacggtttgcgccatgagttcgatggcaaaccacgctggaagctgcccctgctggtcgagaaacggagccaacacgccctcgggactgacgcgtacccgacaacaggcggtgttttcgcctacctcgagcacctcttcgagcaagaccatcggcgcggcgtgaggcaggtaatgctctgcggctaaataattcactgtggttttcccaacaagatactggcgttattgcccccgaaggcaaaagaattcgagagaatggccgctttttgcaatgtctgctcgcgggtcaccaggccgaattcacccagcgcagggtctgccaccgagtgtgaaaagtcctgctgcggcagggcaatattacgactgagaatcagccagctcagggcggcttctgtcgcacccgccgctcccagcgtgtggccagtcaaatgtttggtagaactgcagggtacgcgatcggcaaacagccgctggataacctgcgcctcaacccgatcgttctgctccgttgccgtgccgtgaagattaatgtagccgagactgtcggctgttattttcgcttgctccatcgccatgcgtatcgcccgctcggctccttcccctgcggatgcggggcagacatatgccaggcatcggaggactcgccgacgccgagcagcgcaacgggtgccggctcgcgggtcagcagaatcaacgcggcgccttcgccgatattaatgccgtctctctcggcggcaaacggcgtacagcgcgtgctcgacagcgcttcaaggctggcgaaaccgttgacaggcatgcggcaaaggctgtctgcaccgcccactagcgcgacatcggccaggccagcctctatcaggcgttgcccgctaataatggcgcgggcgctggaagtacaggccgtagacagggtataggatgcaccctcaagatcgagcagacgactcaggaattgcgaggggtcacccaactcctgctgctgataggcatattctgccggaaaatcaccttcagcctgaataaactgaatagcgtcttcaccttcggcaataccggaggtgctggtacccatcaccacggcgacgcggtctctgccgtactgggcaatggcgctatcaacctgcggcctaatctgcttcaggaccgccatcaacagctgattattacgggttcgatggcgcatcagcgcatccggcaccgcgggcagtggcgttaaaacctgtcccagccacacgggctgctgactggtcagccagccttctcggagcgtcatccccggagaacgccctgccgccaaatttttggcaatctcgtcgagctcgccacccagcgcgttcaccatacccaccgcggagaaatagatcatgcgccgtctcccacattctgaatcgcaatgtgatagtgaaaaacgtgctgagttatagcgataggctgacgtttaccgccctgattctggtaatcaatttgggtcaccggctgacccgcatcgtcaatgagagtacgggtcatgccgttatccaccagcctccaacctgtgggcagcagcggctgccaacggtcgacgggccagtagctcagcatgatgtcggccaatacctgattagcgggcggcagctgggaaatttttatcgtctgctcggtatgaatgcccgcggcgtcgtaatctaccttgaacaggcgaatgcctaagggtgaaaggcccgccagctgcagggtttttccgttagcgttaagcaataccagcagcgactgctgtttgccgtcgacggtgccggtcagcaactgctgctgttcaagcttctcgttcaactgggggacggtaaacgtacccgcacgccgggcttcaaccacgcctgcggcaatgtgtcgggcgtgggatgcgtggcacaccccgccagcatgagcgccattatcatcaagagccatcgggccttaatcatttattacttcctctttttttacccggcagcgtcagcggcgagagcacgaaggcggtcaaaatgccgctactcagcacgataccaaagctgctaattgcctgcgtcgagctgaataccagcatgccgaaggtcagttgtgtggtgaccacggccataaagacggcaaacatggacgtcgtcggcgtgcctcgtggattggtaaagaacagcgtgtaattgatgccaatcccgagtaccagaatcagcgccagcagcgaaaacaggttgagactgtgcccgcttagccccagcgccgccacgcccattgccagagacaacagcgtcggaatgcagcaaatcaggccgtgtggccagcggaatcgccacagatagatggcgcaaatcaccccggcggccaacataagcagccatgacagcatcacgcgatactgttcgaacaggccgctgaactcgcttttgcgatccacccaacccacgccgggcatcgcctgcgccagcgactgcatcgccgcgccattgctgacgccgttaaccgggaccagcgccgcgctgcgcccgtcaggcagcgaaagccacagtagccgccagccctgactgattacgctgtgctgccatgcttggggcgtgacccactgcggcgacacgttggctaccgagacgttaagacccgcctgcttaagctccgctgccacctgtggcgcacgctgcgttaaaagagccaaatctgcctgttgcctctgcatagaaggcagtccgagcaggcgatacccagccactgcgccctcttttttggcctgcgcgagtcgcggttccaacgcctcgagccgctgtaacgtctgctcggcggtgtcgccgtaaaccaccagccatttctgttcattagactggccggtcaacgctgcaatctgcctttcctgcttgagcagatcgcctggaagtgcctgaagttggccgatatcatcatcgacatgcagccgaattccgccgattgtcgccagtatcagcaccgccaacggcaggccgatgcgcagctttttattactgcgccaagcgtgcagccagcacaggataagtcccagcccgggcgttggcccaatcggtaagcgctttgccagataaggataccagcacatcaccgtgatgcaggccgcgctgagaccggcagcggcaaacaccgccaactgctgcataccggggaaaggcgcaatcagcagcatcagataggcagcgacggtggtcaacatcgccattgataacgccggaaacagtttcttcaggctctcgagtggcgttgactgcccgccgtgaacgtggcgatcggtcagaaaatagagcgtatagtcggcggaaataccgacaatgctggtgctgagcaccagcgtcatgacgtgaatttcgccgaacaccagcagcgtcatcaccgccccggccagcgcgccgattgaaatcgacagcaggctcagtaacatcgggatcaccgagcggaacactaaaaggataagcaggaagacgccgacgactgaggctaccccgagagtagagatatcgtgctccgcctgctggctggcataattgctgtaaaaaaccgtgccgcgttcgagcacttttgcacccggccactgggcctcaaactgcgttttcagggcgtcgagctgcccgacaatttgtttactgctggtgatgtcataggaggaggcccgcaactcagcgtgaagtaagtaccaacttttcccctgagtgtctttagccaccagccagccgttatccagcgtcatgcctgcgccattttgctgctgcgccatttgtgaggcgcgaaccagcaacagcgggtcgcccgtcagctctttaccgctgacgcccgcgaaggccgaatatacctggccgagtatccactgcgactgcgccgccgcgcccgcgctcaggcgtgctcgggtggcggcgtccatcagcgcattacggtggttgaaaaagaacaggccccactgacgttgacttgcgtcgtccatcggtccttcaacctgctgtaatgccggtaatttttgcagcttttgcagccatgcgttcagggcgttgtcacgctgcgcgccttcaggcggtttaaccagccacatcagctgacgatcgagccgcttgctaaacgcgtcggaaacgtcttctggaacaccggccagctgctgcttgggcaacagcgccaatacgctgctgttaatctggctacgcggcagcagccaaaaaagagcggccaccaacgcgaggcagataagcaaccagcctagcgccagccgacgatggtgttcaggaagaaaaatgctgcttctcggcatcggtcagcgtcttaggttctgtgcgttgattaaagaagcgaatttgcgtcacatcgccctgcatatcgttgatattgatattattgaggaaggtctgaccctccagcgtgatggtcttgaacagcctgtttaacggcgatgttttaggcgtgagcactaatttccaattgccctggccgcgatcgctgaaatccagcgtgaagttctgctccagcgcacgatgatcggcatggaacaacgcggtcagcagtgagttaaattgaaacatctgcgggttattctgcgcagtgactgtctgcggcggctgaccggccatcgtctgcaccatgcgactgtcggttaacagcaggctcagcgcgaagggcttctcctgctgccaccaaagtccgtcattgcgtgagatgaccaggataccgctggaattaagcttctggtccatgccgctgacgctacgctgctggctgaactcggcgcgcaggaccggctgttggctaaaacgctgctggaggtcgtcgagcgttaccgcatgtacgcttaggctgaagagcccaagcatcaagaaaactaaacgcctcattggacgatccccattttttcgaataataccggcggtgagacaaagcacatctctttactttcgatctgtaccgcgacctgaagcgtgtagccgctggtcgtgcgttttccactgtctgcgtcaaatatctgatagccaatccgcaggcgattctcgaactcctgtacctcggcctgcacgataatcttctgctcgaaggtgaccggtccgatgtatttgagacgcgtatcgacaataggccagacgtaacccgaggcttccatagcgcgatagccatagccgaactgcttcaggagcgcctcacgggcgacctcaagatagcgaaaatagttgccgtgccagaccacacccattgggtcgacgtcatggaaaggcacggttatctctacgcacgcagtaaaacgaggatcggataaacgcgggtcttttctctctgccatatcaatcagactctctgtcagcaggcacgcccgatgggcgctgccaaaaatcataaaaattaaaccagtcatgcggggccagcaggctgtagtgctcgagacgttgcgcatagctgtcgacaatgttctgcaaactttgctgccgggtcgcacgcgggagcagcaaggggtcggcaaaaggttcgaaatagatgttcagccgttgccgctgcaggatgccaaacatcaggaaaacgggcacgcgcagcaccgaggccagaatgaacgggccctgtggaaaggcggccgtagcgccgaggaaatcactcaatatcacccgttgctgtccgccgcgctgatagccccccgccgaagtgcgatcgccgacgacagccacccattcaccgcgatccaggcactctttcaagcgaatggcagtatcgggccccatgttcgtcacctgaatcaggttgacgcaggcatcggggttaacctctttcatcacctgattgaatctttcagcatgctgggtaaagaccagcgcattcactttcacgtttttattgagctcgcccagtgcgcggcaggattcgatatcgcccaggtgggaacagagaatcagcgtaccctgcccactggcgatttgtgcctcgcagcgcgcggcgtcaaccaatagcgcatcgcggcccaacagcgtgtcgccctgccaggtcgccagcttgctcaacatcgcgtcgccgaagcgcatgaaatgccgaaaactgctgagtttataaggcagggttatcctgcgggcttcggccacgcgagcaaggcgacgcaaatagtcctgcgaagcctgccgctgcctgcggcctgttagccagaaatagccaatcacaggatagagcagcagcgcgaatgctccccgcccgagcaggcgatacaccttaagcatcaggcgaataccccacagccctttccgctcctgagtcttcgaccagtggggctcatcgcgagtactttgccgtctgcgcaacagactgggaatgcgtggcagcatgccgagaaacagccgtgtgtgcatccaggaaatacgcaggttgtcttttaacgcatcaaaatgtgaaaggccctcttcagggtaaaccacgcgcgtcgcgataaagcggctgtcggtcccctgccagtaaagcctcaccataatttcggtatcaaaatccatacgctcgcctagagcatttttgcgcatcacgtcgagcgacgccgccagagggtaaacgcgaaagccgcacatactgtctttcagcgacagcgacagggtttctatccacacccagacgtgggtgacatagcggccatagaggcgcgccttgggcaccgaactgtcgtagacgggcctgcctgagataaggcactcagggtaagcctcggcttcagcgagcaagaccggtatatcggcgagctgatgctgtccgtcggcgtcaacctgcagtgcgtggctgtagtcctgttccctcgcctgtttcattgccgccatcaccgccgcgcccttgccctgatttttaggtaatcgagtcagggttacccacggataaagagccgccagccgaacgagttcgtcggcggttttctgctcactcccgtcatccaccaggatgcagttgagaccaaagggttgaatacgttccagcacacgggccatcgtcgcaccatggttgaagcagggaataatgatgcagggacgaaaagcgcggctcatggacatagatttatctttccgctgcttgcctgaaattcgccaacctgataactgaacagcagcttattcttgtcctgcaaccactggatagacagcgtgacctgctgctctggcaacagcggctgctgaaacttgatcacatcaaatcctgcgaaatgggcggcaagcgggagctcttcgcgagcgaaggtcatcacccagttgagttgagccacgccgggcagaatcggctgttcggggaagtgccccttgaaccataaaagcgtcgcgggcagcctcagttcaagcgtcacgctgtccgcctgacgctgtttactcagcacctgtggctgcatcataagaataattcctgtaggtctgcgtaggcacgtttgccctgcgaattaaggggaacggcgggcaggacgcgccagaagcgaggcaaggctacgggggccagccatgggcgcagcagctgtcgcagcctcatgttcatctcggcctgtggcaaggcatgccactgtgttcggcccaacgggctcaacaccaccaccgcggcgatgtagggacgcccttttttttctatcgccagcacgcaggcatcttctatcaccggcagctggatcaagcggtcctcaatttccgttagcgaaagtctctgctcggcgattttgacgatacggtctttacggcccaacaggtaaaactcgcgtccgtggttaatcaacgcaatattatcgcctagttcgagaccttccgactgtgagacaaggtctgaaaacacgcggatactttgttcatttttggcacgcagactgacgccttcgaacaaccgccagggtgtctcgggttcctgtggctgacggtgggcaagaatgccggtctctgtggtgccataaatatcattaggagaaacgccgcaaagctgccgaatcttttctgcactttgcgctgacagcggcccgccagccgagaagaccttgaggcagttgactggcgttatttttgcgtcaagcctggtgagaaacgcgggactgctcacgagcgctaaaggatattgctgcgccatgtttaccagctgttcatgcacctcaacactttcagcgtaaaacggcagaccgagggtgagcggcagcataaagcgaaacgtcaggccgtacatatgctgggaggaaaccgtggcaacgaaacgcgcctgatggagcgcctcaccccaggtgttcgccagccattggctttcggtatgcaggcagctgagcgttttaataattttttgcggtttgccgctcgagccggaggtaaacagaataagcgaggcatcgcgagggaaatcgggcagtggaaagtccgcttctgaatccaggcattcaggcagcgtgatcgttgggcacggcagcgtcagagcgcagtctgttaacaaagcatcaaattcggcaatctgttcttctaacaccgactggcgctgatgccccggcagcaccggcgttttttcgcagtaaagcaccgcgagcaggccgacggcaaaatggtagctattgttaaagcacagtgcacagcggcttgcaggcagcccgcgtacatgaccaatcagcgccaacacgtcgcgacgaaaatcactctgccgccattcacgttgacgactccaggatatcaaccgatcttcgccttcaaccggcattagccaattttccatcgccagcgttaagcgcgctgaacccgctttctgactatccattcaacacccatcaataagccgatcagcagatagctgatcccgccgttgtacaaagtccacagtgcgacatcgcctttgaggcaggtgtagaacgcaattgcaccatttaaaaaaaagaaaacacaccagacctgcgtcacgcgccgcgtatagctcacggccttcggtggtaagtctggctgagagagtcgagcgagccgctctacgacgggcggaggtgatagcagtgaatagccgaataaaagcagcagcagtgtgttcaccactaccgggtaatacagtaacatttggctttcatgcaacaaccagcttgccgcggcaaacagcaatccagcggcggccagcgttctgcctagcgcagtgagttggctcagttttccgcgaaacgtcagcagccgcaggataaacgtcaccatcagaataggggccagaacacccattccgccgttccttaaccccagccatacggccagcggataagcaatgatgactaataccgtgaccgcatgtaacagcgcggccaggcgtgggcgacctgcagcctgcatctgactacggttcttctgaatcgagtaaggcgtcgatggcgtcaacgatgtcttgcaccgtcttcaccgatttgaagctctcaggtttaatctttttgccggtggccttttgcagatgcaccactaaatccacggcatcaatactgtccaggtccaggtcctcataaagtcgggattctggtttgatatcgtcggcatcgagttcgaataatttgaccagtagaccgctaatttgctgataaatctcaagcttgctcataaaaccttcttacacaacattgttattgttaatcaattatttcgattgcccggcgataaattttgcgagcgtctcaaccgaataaaaatgctgacgcatttcttcgctttccgcagaaagcacgacaccatatttatttttcaatgccaggcccaattccagtgcatcaatagaatccagtcccaatccgtctccaaacagcgccgcatcagcatctatttcttctggcgtcatcccttcaaggttaagggtgtcgatgatcaggacttttatttcattacttaatggatccatgacttatttctcattattttttaacattaactcagtacgcagatgatgagtaagacgcctggcagctatagcgggtgaggcatcgccctcttggataaagtcccgggtcgcaactttgcctttaaccttaataagaaactgcggtttaatcggcggaatactataccaccgcccctgttttgttagcatgggaggtcggcacgaaatataaacaacgcgaatgtcacaacccgctctcagcgcaatgttggcagcaccacgttgtaaagtaatctcttttccttcaatagatcgagtaccttcaggaaaaataagaattgtcccgcccgcttttagtctttcttcacaggcatcgagcaacgtttccgatcctgaattgaccaaatatcccgcagacttgataacgcctctaaaaaagggattcatcagcagcgactcttttacgatgcaatcacagcgtggcatgcaagaagcgagcaaaacgtaatctaaaaggctggggtggttggcaataaccagacaacctttatcctgcttaaaaagttcagcaccttctattttaaaatccaccacgcggagatggcgtaacagactcagaaataaaacaaagctattttttatgctattcaatgtgagttgatgcagcctctgcgggttgcggataaacagccttaacaacgtgaaccagccaagcgagagtatgagtccgccaatattaaataaaatcagcaacagccccgtcgccagccatcgccacatgcggtttatcagactggcaggcttaatgatttctttgtccgcgctcaatccttcctgttccattgccattgtccgacctcacctgcaatgcaaaacgttttattgtttagcaaaaaattccttaagaaactcagactttgagggaccggctcctctgatgcttcaccactgcgccgacaggtgaattgctcgcccagcgtcagcaccagcgcgacgcaataaggcgcatattcctgtgcgaaatcgttgccatacagctcaggcacgacaccgtcgaaatcaacgagcaacactttttcaccctcatccgccgacagcatcgcgcgcgcctcaatcaggccttgctgaaaactgtccttacccgctgcaagtgaagtgacaggcagtggatttttagctgttattgtcagccagcctgccgccgtattgtgtacggacatcgaaaaatcggtaggagaaacctgctgctcctgtgccaatatctgcaaaattttgtaggtgcgctcaagttcgccgtggcggctggtaaatacggcacgggctatctgatgcttttcaagcagtgccagccctgcctctacggcgatgcggctaacgggactcattcttctagcggacatcatcgggatacgttggcttttctcaatttcaccgctgaaacccatgaagtctggcaacgacgcccaagcgttccaggcctcggcatgattcatacctggcgctatcgcataccaatcaagtaccgttaatgagtagttcattttatcgagctctcggatttttattcgtatcgagtgagactctatttgatttcaaactgagttgcatctgcaattacgaattgtcctagccattaagtgaagaaataggatcttatcagggataaagtaaaaaatattgatgtagcattaattaagaactcattaatactaaaaataaacttaagaaaaaactatttttagccttccttataagggctgagtttattaccccataaggttattaaaaggatattaacaaattaaaagtttcagccaatcagcatattactgacttgggatgaggtgaattcagtatgaaattcaccccggaattgttcgtaaaatcatcccgaaggcagttaaataaaactttttattcttgcgcattgactgaagatgtaaatacggtggatgttattgaaatgcagaggtaaatgagcaggtttttaggctttataatgcaaaaaaccctgaatctttcgattcagggttatgcaattagtggcggaacggacggggctcgaacccgcgacccctgcgtgacaggcaggtattctaaccaactgaactaccgctccaccggttctttcactcacaacagacaatcggtctgttatcagtttgttccttgtatttttccttgtcaggggaaaaaggaaccaatttgatgcctggcagttccctactctcgcatggggagaccccacactaccatcggcgctacggcgtttcacttctgagttcggcatggggtcaggtgggaccaccgcgctactgccgccaggcaaatcttggtgcatgaaacgaatcttttaccctgctgctgcgttggctgccttcgcgcaatgcagtcacataccctcgtatgctcctttattacactctgttgccgcctggcttcagcgcaaaatctttcgttcccgcgaatactttatctggaagtcgctgaaaaatttactttagtcttgtgtctctctaaaacaccttcggtgttgtaaggttaagcctctcgggtcattagtactggttagctcaatgcatcgctgcacttacacacccagcctatcaacgtcttagtcttaaacgtcccttcagggagctcgaagctccagggaagactcatcttgaggcaagtttcgcgcttagatgctttcagcgcttatcttttccgcatttagctaccgggcaatgccattggcatgacaacccgaacaccagtgatgcgtccactccggtcctctcgtactaggagcagcccctctcaatcttccaacgcccacggcagatagggaccgaactgtctcacgacgttctaaacccagctcgcgtaccactttaaacggcgaacagccgtacccttgggacctacttcagcccaggatgtgatgagccgacatcgaggtgccaaacaccgccgtcgatatgaactcttgggcggtatcagcctgttatccccggagtaccttttatccgttgagcgatggcccttccattcagaaccaccggatcactatgacctactttcgtacctgctcgagccgtcactctcgcagtcaagctagcttatgccattgcactaacctcacgatgtccgaccgtgattagctaaccttcgtgctcctccgttactctttaggaggagaccgccccagtcaaactacccaccagacactgtcctcaccccggattacggggccgagttagaacatcaaacattaaagggtggtatttcaaggttggctccacgcagactggcgtccacgcttcaaagcctcccacctatcctacacatcaaggctcaatgttcagtgtcaagctatagtaaaggttcacggggtctttccgtcttgccgcgggtacactgcatcttcacagcgagttcaatttcactgagtctcgggtggagacagcctggccatcattacgccattcgtgcaggtcggaacttacccgacaaggaatttcgctaccttaggaccgttatagttacggccgccgtttaccggggcttcgatcaagagcttctccttgcggataaccccatcaattaaccttccggcaccgggcaggcgtcacaccgtatacgtccactttcgtgtttgcacagtgctgtgtttttattaaacagttgcagccagctggtatcttcgactgtcttcggctcgggaagcaagttcctccacctagcgacagcgtgccttctcccgaagttacggcaccattttgcctagttccttcacccgagttctctcaagcgcctgagtattctctacctgaccacctgtgtcggtttggggtacgatttaatgttacctgatgcttagaggcttttcctggaagtgcggcatcaactacttcatcaccgtagtgactcgtcatcacgcctcagggttacagtaaaccggatttaccaggtctacaccctacacgcttaaaccgggacaaccgtcgcccggctagcctagccctctccgtcccccttcgcagtaacaccaagtacaggaatattaacctgtttcccatcgactacgcttttcagcctcgccttaggggtcgactcaccctgccccgattaacgttggacaggaacccttggtcttccggcgtgcgggtttttcacccgcattatcgttacttatgtcagcattcgcacttctgatacctccagcaaacctcacagttcaccttctacggcttacagaacgctcccctacccaacaacgcctaagcgtcgctgccgcagcttcggtgcatggtttagccccgttacatcttccgcgcaggccgactcgaccagtgagctattacgctttctttaaatgatggctgcttctaagccaacatcctggctgtctatgccttcccacatcgtttcccacttaaccatgactttgggaccttagctggcggtctgggttgtttccctcttcacgacggacgttagcacccgccgtgtgtctcccgtgataacattcttcggtattcggagtttgcatcgagttggtaagccgggatggcccctagtcgaaacagtgctctaccccgaagatgaattcacgaggcgctacctaaatagctttcggggagaaccagctatctcccggtttgattggcctttcacccccagccacaagtcatccgctaatttttcaacattagtcggttcggtcctccagttagtgttacccaaccttcaacctgcccatggctagatcaccgggtttcgggtctataccttgcaacttgacgcccagttaagactcggtttccctacggctcccctatacggttaaccttgctacaaaatataagtcgctgacccattatacaaaaggtacgcagtcacctaacaagtaggctcccactgcttgtacgtacacggtttcaggttctatttcactcccctcgccggggttcttttcgcctttccctcacggtactggttcactatcggtcagtcaggagtatttagccttggaggatggtcccccatattcagacaggatgtcacgtgtcccgccctactcatcgaactcacagtttatgcgcttttgtgtacgggactatcaccctgtaccgtgcgaccttccagacgcttccactaacacacaaactgattcaggttctgggctgttccccgttcgctcgccgctactggggaatctcggttgatttcttttcctcgggtacttagatgtttcagttcccccggttcgcctcgcatggctatgtattcaccatgcgataatgtgacgtatcacattgggtttccccattcgggtatcgtcgggtataacggttcatatcaccttaccgacgcttttcgcagattagcacgcccttcatcgcctctgactgcctaggcatccaccgtgtacgcttagtcgcttaacctcacaacccgaaggtgtcttataaactcgtaaagagtgacaacattcgaggctgtgattatttgagagactctaatacaggtgcgcataactcagtacttctacggagagttatgttcagctgtatcatttcaatttttcagcttgttccagattgttaaagagcaaaatacttcgcagtatactgtcgccaatatactctgaagtattggtgtgaaccgtatggatatggtggagctaagcgggatcgaaccgctgacctcctgcgtgcaaggcaggcgctctcccagctgagctatagccccatacagtcactaacagatacctttatcactcatcgttcagatgagtcagccaatgcttttcttatcaaggcggagtcacacgacgtttgcttggtgcaaacgagtggggcgacaacgcagagaaggaaaggattggtaggcctgagtggacttgaaccaccgacctcacccttatcaggggtgcgctctaaccacctgagctacaagcctataaaggtatttctgctcgttactttttcatcagacaatctgtgtggacactgcacaatgcgtatcttgaggtaaggaggtgatccaaccgcaggttcccctacggttaccttgttacgacttcaccccagtcatgaatcacaaagtggtaagcgccctcccgaaggttaagctacctacttcttttgcaacccactcccatggtgtgacgggcggtgtgtacaaggcccgggaacgtattcaccgtagcattctgatctacgattactagcgattccgacttcatggagtcgagttgcagactccaatccggactacgacgtactttatgaggtccgcttgctctcgcgagttcgcttctctttgtatacgccattgtagcacgtgtgtagccctactcgtaagggccatgatgacttgacgtcatccccaccttcctccggtttatcaccggcagtctcctttgagttcccaccattacgtgctggcaacaaaggataagggttgcgctcgttgcgggacttaacccaacatttcacaacacgagctgacgacagccatgcagcacctgtctcagagctcccgaaggcactaagctatctctagcaaattctctggatgtcaagagtaggtaaggttcttcgcgttgcatcgaattaaaccacatgctccaccgcttgtgcgggcccccgtcaattcatttgagttttaaccttgcggccgtactccccaggcggtcgacttaacgcgttagctccggaagccacgcctcaagggcacaacctccaagtcgacatcgtttacagcgtggactaccagggtatctaatcctgtttgctccccacgctttcgcacctgagcgtcagtctttgtccagggggccgccttcgccaccggtattcctccagatctctacgcatttcaccgctacacctggaattctaccccctctacaagactctagcttgccagtttcaaatgcagttcccaagttaagctcggggatttcacatctgacttaacaaaccgcctgcgtgcgctttacgcccagtaattccgattaacgcttgcaccctccgtattaccgcggctgctggcacggagttagccggtgcttcttctgcgagtaacgtcaatcgttgcagctattaactacaacgccttcctcctcgctgaaagtgctttacaaccctaaggccttcttcacacacgcggcatggctgcatcaggcttgcgcccattgtgcaatattccccactgctgcctcccgtaggagtctggaccgtgtctcagttccagtgtggctggtcatcctctcagaccagctagggatcgtcgcctaggtgagccattaccccacctactagctaatcccatctgggcacatccgatggcgtgaggcccgaaggtcccccactttggtcttgcgacatcatgcggtattagctaccgtttccagtagttatcccctccatcaggcagtttcccagacattactcacccgtccgccgctcgtcacccagagagcaagctctcccgtgctaccgctcgacttgcatgtgttaggcctgccgccagcgttcaatctgagccatgatcaaactcttcaattaaaagttcgatttgctgaaacaagttcagcgatgctcaaagttacttcacatcattcataatgaattactgcttggtcactctaagacttgatattttttgccaccgaggtggctgatatcgtcttgtgagtgcccacacagattgtctgataaattgttaaagagcagtgagttacgcgctttcgcttgctaactcgaggtggcgtatattacgctttcctcatttgatgtcaaccgtttattttcgcggtcatcatcatttttaattctttccgacttgttcacaccgcgttgctgctgcgttgttccctgtcgatggagcggcattatagggaggctggcgggaatggcaagcgaataaatacagttttatttcgtttgcctatttttcgcccgcaacgctctattttaagccgtttttaatggctacaggcagttgtgccaggctatcgagcactaaatccgctaattcttcaccttcttgggtgaccggcttaccgctacggactagaattttagtgcctacgcccgctttcattgctgcctgaaggtcttcaattttgtcgcctaccatataagaagcggccatatcgatgttcagctcttctttagcagtaatgaacatgccgggttctggcttacggcagtcacaaacctgtttgtactcttctactattgcatcaggatggtgaggacagaaatagatgccgtccaaatcgacgccgcgatcggccagcgaccagtccatccattccgtgagagtgaaaaattgttcttcggtgaattttccgcgagcgatgcccgactggttggtcactaatactaaggcaaagcccatttccttcagtttaaggcaggcttcaatagtgccttcaatgaactcgaagtcatcaatttcatggacgtagccgtgatcgacattaagggtaccgtcgcggtctaaaaatattgctggaacagtttgtgccacgtatttgctcctgatggctggttgacggcgtaagtatcgcatgttttaggggcggtgagaatgctatctggttgacttggacgtctagacgccttagcatccacgccaagttctgggatgaattccagagggttactttttatacgttacggcagtaaagccgatataagaaaaatatgattaaactttctaacatcaccaaagtgttcaagcagggtcagcgcaacatcacggcgctttccaacgtgagccttcacgtgcctgcaggacaaatctatggcgtcatcggttcttccggtgccggtaaaagtacgctgattcgctgcgttaatctgctcgaacgcccaaccgaaggtaaagtgctggtcgacggtcaggacctgactgccttctcggagaaagagctgacccgcgcgcgtcgtcagattggcatgatcttccaacactttaacctgctgtcttcccggaccgtcttcggtaacgttgccctgccgcttgagctggacaaccttccttccaaagagattaagcagcgcgttaccgagttgctgacgctggttgggctggaagataagcaggacgcctaccctgccaacctgtccggcgggcagaagcaacgtgtagctattgcccgtgccctggcaagcaaccccaaagtcttgctgtgcgacgaggccaccagcgctctggacccggccactacccgctctatcctcgagctgttgaaagacattaaccgtcgcctggggctgaccattttgctcataactcacgagatggacgtggtgaaacgtatctgcgatcaggttgcggtgataagcaacggtcagttgattgagcaggacaaggtgagcgaaatgttctcgcatccgaaaactccgctggcacagcagtttattcagtcaacgctgcacctggatattccagacgactatgcgctgcgcatgaaacccgagcacagcgaaggaagtgttcctttattgcgtctggaatttaccggtcaatcggtcgatgcgccgctgctctctcatgcggttcgcaaatttaacatcaataacaacattattagcgcgcagatggattacgccggtggcgtgaagttcggcatcatgctgaccgagatgcacggcagcgttgaagatacacaggcagcgattgaattcctgcaccagaatcaagttaaggtagaggtattgggttatgtctgaggcaatgatgtggttacttggccagggtgtttggcagaccgtcataatgaccctgacttccggcttctttggtttcgtgctgggtctgccgatcggtgtactgctgtacgttacccgtcctggccagattgctgagaataaaaagctgtaccgcgtgatgtcggcactggtcaacatcttccgttcgattcctttcattatcctgctggtttggatgattccattcacccgcattatcgtgggcacctcgattggtctgcaggccgctatcgtgccattgaccgtgggtgcagcgccgtttatcgcccgcatggttgagaacgcaatgcttgagatcccaagcggtctggtcgaagcggcccgcgcaatgggtgcaacgccgatgcaaatcatccgtaaaatcctgctgccagaagctatgccgggcctggttaacgcggcgaccatcacgctgattacgctggtaggttattcagcgatgggcggtgcggtgggtgctggcggtttgggtcagattggttatcagtacggttatattggttacgacgccacggtaatgaatactgtattagtattactggttgtattggtgtacctaatccaactctgtggtgaccgcattgcaaaagcggttactcataagtaaagaaaaaacggcggcagggcttcacgccgcccataattaatctcgatataaaaatgtatagaggataggacatgtccattaaatttaaatctcttgcagttgcgggtgtacttctgggatcgctggcccttgcaggctgtggcccgaagaaagaagatcctaatcacatcaaggtaggcgttatcgtcggtgcagaacagcaggttgctgaagttgcggcgaaggttgccaaagagaaatacggtctggacgtagagctggtgacctttaacgactacgttctgccaaacgaagcgctgagcaaaggcgatatcgacgtcaacgccttccagcacaagccatacctggatcaacaaattaaggatcgcggctacaagctggttccggtcggtaataccttcgtgtatccgattgctggctactccaagaaaatcaaatccattaacgatctgaaagacggtgaccaaattgcgctgcctaacgacccgactaacctgggccgttcactgctgctgctgcagaaagtgggtctgatcaaactgaaagacggcgtgggtctgttgccaaccgttctggacgtcaccgagaatccaaaaaatctgaaactggttgaactggaagcgccacagctgccgcgttcactggatgacaacaaaattgcgctggcggtgatcaataccacctatgcaagccagattggcctgacgccagagaaagacggcatcttcgtcgaagacaaagattcaccttacgtgaacctgattgtcgcgcgtgaagataataaagatgctgaaaacgtgcagaagtttgttaaagcctacgagtctgacgaagtataccaggctgctaacaaagtctttaacggcggtgcggtaaaaggctggtaattaccggttaacgtcataaatatattcatagttacataatatattcctaaggcgggcttatgcccgccttgttatttcctcaataccttgcttcaataacgcctctttctttcactataaatatacccaacagcatttaaaatgcgctagatgacaaccctgcgactccctgagcgtttatataaccaataacagggcgcgaaaggaaatcaaagccagagcattttgatcgattcagggtatggagcagaggatatatcatgcgcgctttacctctctgtttgttagcccttttgctagctggatgttccgcgactcacagaacgcagcctgtttttaatgaacacccgtatgtagagcagtcaaaacccgtcaaacctaagccagcaccccgaccggtggcagtgaaactgtataaaaacgccgaggctctggtaggtacgccattccgcgatctgggtgaagtgaccggtacgtcttgccagataacgcgccacgaagcagcgccgagcctatcgaccgcgcgcagaaaaatgctgaatcacgcctcctccatgaaggccaacgccgttctgctgcaccagtgccaggttgtcgccgacaccgcaggctgtcatcgtcaggcaatatgccaaggctccgcgctcgacgtcagctttaaatgacagcatttaccttcaatgaaatagggagaattcactctccctataaagaaaagtttgccgtacctcgtcaacccgggctggtgcaagacggcggtggcgagctgcatctgttcccgccttataatcagcccgaggccgtgcgcggactggaagagtttagccatctctgggtaatgtttatattccaccaaacgatggaaggcggatggcgtcctaccgtgcgccctcctcgtctgggtggcaatgctcgcgttggcgtcttcgcgacccgttctaccttcaggcctaacccgctcgggatgtcgctggtcgagctgaaaggcatccgctgtcagggtaaagaggtcattctggagctggggagtctcgatttggttgacggcacgccggtggtggatatcaaaccctatcttcccttcgccgaaagtcaaccacaggccctcgcagggtttgcccagaacgcccccgaagccaacatgccggtgactttctcaacgctggcagagacccaattggcggcgaatctgacccgctatccgcatctgcgtcgttttattactcaggtactaggccaggacccgcgccccgcttaccgtaaaggtgaagagctagagcgcgactatgccgttcgactgttggattttaacgtgagatggcgcgtagttgccgatcaaaatcaggtaatctcgctcgaccagcactaaaattcggtggttctcttttgactctcgtcggcgactggtaaactagctgaccgcaggctatttctggggtcatgatagcggcggttgacgaccgattattcgaatactttcacgttctggcaggcacccggcctgcggacgatttgcagtgctaacggaaccaacacatcatgcgtacaacacaatatctgctctccactctgaaggagacgccagccgacgccgaagtcatcagccaccagctgatgctgcgcgcgggaatgatccgcaaactggcctcaggtctttatacctggctgccaaccggtctgcgtgtgcttaagaaagtcgaaaacatcgtgcgcgaagagatgaacaacgcttgcgctatcgaagtctccatgcccgtcgtgcaacccgccgacctgtggcaggagagcggacgttgggaacagtacggtcccgagttgctgcgttttgtcgatcgcggcgatcgcgcatttgtactcggccctacgcatgaagaagtcatcactgacctgatgcgcaatgaaatcagctcctacaagcagctgccgctgaatcttttccagatccagaccaagttccgcgacgaagtacgtccgcgtttcggtgtgatgcgttctcgtgaattcatcatgaaagacgcctactctttccacatcagtcaggaatccctgcaggaaggctatgacgcaatgtacgaagcctacagcaaaatcttcacccgcatgggtctggatttccgtgctgtagaagctgacaccggttctatcggcggtaacgcgtctcacgaattccaggtgctggcagagagcggtgaagatgacgtgattttctctaccgagtctgactacgcggccaacatcgagaaagccgaagcagtagcgccgaccacaccacgtggcgccccgactgaagaaatgcgtctgatcgacacgccgaatgccaaaactatcgccgagctggttgagcaattccaactgccaatcgagaagaccgttaagacattgatggttcgcgccaccgatggtagcgcacatccgctggttgccctactggttcgcggtgaccacgagctgaacgaaatcaaggccgagaaactgccacaggttgcttctccgctgacctttgccaccgaagcagaaattcgtgcgctggttaacgcaggtccaggctcgctgggtccggttcacctgccgctgccaatcgtgattgaccgcaccgttgcggtaatgagcgatttcagcgccggtgccaacatcgacggtaaacactacctgggcgttaactgggaacgtgacctgccgctgccggaagtggctgacctgcgtaacgtagttgaaggcgatccaagcccggacggcaaaggtaccctgcttatcaagcgcggtatcgaagttggccacatcttccagctgggtaccaagtactctgaagcgttgaaagcgaccgttcaaggtgaagacggcaagaaccaggttgtgaccatgggctgttacggtatcggtgtgacccgcgtggttgcagcggctatcgagcagaaccacgacggtcgcggcatcatctggccagacgcgattgcccctttccaggtggctatcctgccaatgaacatgagcaagtctttccgcgtgaaggacgccgccgaagcgctgtacaacaccctgcgtgccaaaggcgttgacgttattctcgacgaccgtaaagagcgtccgggcgtgatgttcgccgacatggaactgatcggcgtgccgcatcaggttgttatcggcgaacgtaaccttgacgctgaagagctagaatataaaaaccgccgcagcggtgaaaagcagatgattaaaatcaacgacatcgttgattacctgctgagccagatcccacgctaaaagcgcggcgggtacacctttaggttgcccgctgtgccatcaataacaaaacgcccgccggtgctcattgcaacggcgggcgttttttatcgggtcatctcaccacgattactggcattgcctgttggcatccaggctgatattgctgtcggccaccagcagtttatgccctttgccttcatcccgcccggctcaacctggaaatgtccgtccatcgagacaaaaaccagttggtcaggactgtgacgcgcatccatgtaggccttttgcagactgctgctggtcgccatcgggatgactttaccggtcgcgcagtcggtaaagaccacgttattggcgtcgtaacgtaccattccgctcaacggcatcggcgtttgcggcatatgctgttcggccggcttaagctgatacttgagggtagaatgtatgacttcgccgtgggtatcgagcatctcaaggttatctcccaccgggcggaaataacgtttctcgccgttggcctcggtcagaaccagcttatccgcggttcgggcccatttgccgtactgggcgaaggccttattgtccttcggcttgacctcatagacttcgcgtagaatataggtcccgtcctgctgcaagaacagcgaggtctcgatcccgtcacagtctgcgcacggcagcacgcccttatagctctgctgcatggcctcaaaaggttgttcttgtgcaaaaatcttgttgtgacatccgaatagcgataacaggctgaaggtcagccccatagcaatcattatttttttcacagttttctcccactgcgttttatcttcactcggcctcgacgtttctcatcaggtcgagcggatttttcctctcaatgcttttgtagcgcctttgcgtactttactttcaacccgacggatcttggaaccccgcgttggtttggttgcacggcgtggcttttcaaccaccatggcctgctcgattaatgaagccaggcgcgccaatgcggcttcgcgattaagttcctggctgcgatattcctgcgctttaatgacgacaacaccttcggcagtaattaaatgatgcttaaacgccaacaaacgttgctgataatattcgggcaggcttgaggctttaatatcgaaacgcaggtgaatagcggtagaggttttattaacgttctgccctcccgcgccctgcgcgcgaatggccgtcagttcaatctcgctgtcgggaatctcgagcctgccggagagtatcaacacccttaaagttccgcctgtttccagccgccgtccagccactcgtggaaatgaatctccacgttattctgggcgtcagataaccagatagcaccgtcttgtaacgttgcctgcaataccatgccacgctgaccaaaagagaccaactgggtcagtaattcatcatcaatatagcgcacgctcaggttcgagtattggctaactttgttctgaacctgcgaccaccagaccttggcagcacgctcaccatacgcataaagcacgacgttgcgcgactgattacacgcctttttcagacgcttctcatcgggcaagcccaattctacccacagctcgatgccgttatggtcatttttcagccagatttccggctcatcttctgcgctgagtccgcgcgtaaaggtcaaacgttcgttggcgtggcaaatccaggcgagtaaacgcagcatcatgcgctgctcggtttcagagggatgctgtgccagcgtaagattggcatcgtagaaaaaattacgatccatatcggcaatattgactgcggctttataaattgttgcttttaacgccatggtaaacctctaagtaatggacgcacattgtacttgatatcgacacaagataaagcttggacctgtgctgataactacagcgtctctgtgctatagtcgtttaataacggaagtttatatttccctggctgaaaggatttggcttatcgagggaagcagaaaggagcttattcgaaaagattcgtaaagagccatttcgaacaagctctaaaggaggacctatgcaacaatactctgaattagtacgccaaaaatattccgagataggcagtggctgtcttggttatgtgcccgatgcgttgggctgtgtgctaaaggcattagacgatgtggcggccaacgccgaacttccgtcttccgttcgagaacaggcggcttatgccgccgctaacttactggtgagcgattatgtcgattaatgatgagtaccaacccatcaattgcgatgactacgataatctcgagcttgcctgtcaggatcatctggttctgacgctaaagatgcgcagcggagagcttgtcgaggctaaagccaaagatttgttgatgcgaaaaaaagtggaatatctgattgttgactcgggtggacaacagttggaactgcggcttgaccatatcgagagcttcagtaatccaaaaattggcacagtcgttgtcagcgcagagtagtcgcaagtaaagagcaagactttgccctacagggccaagccaaaatgttaacgggcaatctcaaggttgcccgttttttatggtctgatatcagggtttttggctggcgtagaaggccgacaaatcgctgatatcctgatcggaaagccccgcagtaaacgcctgcattaccccgcctgcccgccggttcgtccgccatttttatagccatgaagcgcaagcgcgagataggcctcattttgtccggcaagattaggataaagcgcgttgctggccttaccggttgccccatgacaagcggcacagcttgacgacttagcctgaccgtcagcaatatttccgtcagccagcgcaggcagactcaggctcgcccacgccagagcggcgctcaacgcgcctttagttaaccaatgcatcattgctcccaaaccggttcaccccggcggtaatgttaagtcttgttatttttgccaaagcagcgaccagacagcctcttgcggacctgtggtcaatgcatcatgggtaataaatagccccgctgcagcgatcggccgttcgttataaaacactaaaggaatgcggtcacgttcccagggtgggacgtcgagctcctgccacagttttttcatctgccgcgaacggtcgcggcccactttatgcacctcgccacgggcatagaaccttatgcttatcgtctcatcgtcacgcggcttgcgtatcgaaagaccttcatccgtttgggacgcgaacgtcaaatgaccgagattgtccggaagattgagtatgccctctccggtccagggaatgaccgtttgtttcaacgcctgcatcggtggcagccagtaaagtcgctggcgaaaacgccgcaggctgaaggcaccgaggcgcatctgaggttcagcgtctgcgcggctgaccgccacttcgtcccacattcgctgtagctgttcacgtgagggcattttagcgccgcatcccgccagccatcgacggagcaacgcaaagcgtcgggactcagagagtggctctaatccgctgaccgacaggctgccctgcgcatcagtcagactatctaagtcttcctgtaacaactcatcgagcaaagactcctgctctgcgcagaggccagcgctgcgtgccgtagcggcagcaaaatgcggccagcgctgatacagcagcggcagcacttccaggcgcaaaaagttgcgatcgaaacgcgtgtcctgattactgtcatcgtctatccagctcagctgatgctggccagcataggcctccagcgcctcgcggggagcgaaagcagaggccttagcagtggaaaaccgccgaccttcgcgcgttcccccatcgacgacagcccggcgggtccgctgccacgcttgagtgccagtataaaggtttcgcactggtcattgagatgctgtgccgtcagtaaggtctcgccgctgtgaagattttgcgtcagtgcctggtaacgcgcattgcgcgccgcggcttctattccccctgactggcatccaccgtcacaaacagcggtaaaaactcgaccttccaccgctggcaatgagcctgacagctcgcggtccaccggttagcaaaggcgctcagcccgtgattaacgtgtatagcccgcagctgtaggtcaggcagaatactggcccgcagctgtaccaacgcgtgcagaagcaccgtcgagtcgagcccgccgctaaatgccacgcacaggcgacgcctgtctcccagctgtttgaccagatgttcaggcagcatggctggccgcgctgtaggcaaacttaatcgatttcataaagttctaaaggcagattatcgggatcggtgaagaaggtgaatttcttgccggtgtgctcatcgatacgcaccggttcacaggctacgcccgccgccagaagatgcgcgacagactgctcaatattttccacgctaaacgccagatgacgcaggccacaggcctcggggcgactcacgcgcgctggcggcgaaggaaagctgaacagttcaatttgatagtgcccgtcgatggctagattggccatccatgagtcacgcgcctcgcgataaacctcggaaagcagcgttaagccgagtacctcacagtaaaactttttgctgacctcataatcgctggcaataatcgcgatgtgatggatccggcgtaaattaagcatcgagcacctcttgtttaagtaccttaacgagatattttccctcttcggtcagcttcgcgccgtggatatcggtctcgaagcccgggaaatgctcacctatagaacacagcatcagcaggaaatccaacaccgcgcggctttccgtcgtaatcatctcgcccggcatgaccaccggtacccccggtggataaggcagtatcatattggccgacaccttacccaccagctgttcgagttcacactcttcaatattgcctcgtacctgatgctggaacatctcgtaaggcgtcattttcatctccggcagcacgtcaaaagccttgagcatcagcgtaggaagatcgtgttcgacgatcagcttgtggatcccctgagcaagatcctgaatgcgcatatgacggtaaaaatcaggatcttcggcataaagatccggcagcatattcttcacccgcagattgagatcgtaagcgcgtttgaagtcggtgagacctcgcatcaggctcatcgacttggttttatcgatgccgatgctaaacaggaacagcaaattataaggacctgtcttctccaccaccacgccgcgctcatcgaggtatttagccaccaacgcggcgggaatgccttctgcctctagcttgccggtttcgtccatccccggcgtgaggatggtgaccttgatagggtcgagatacatatggtccgggtcagcgttggcgaaaccgtgccagttgttatccggattaagcggccagcattcagcctcgtcaatcccttccggctgccagatatcatagaaccagccgtccatttcttcacgcaggcgctgaatttctttacggaaatagagcgccctttccactgaccgattgatcaaacgacggcccgggttgcctcgcagcatcgccgctgcggtttcggcagaggccacaattccatagtttggcgacgtggtcgtgtgcatcatgtaggcttcattaaaggtattttcgttataatcccctttaatgtgaatcatcgaagcctgggaaaacgccgccagcagcttgtgggtcgactgcgtttcatagatgactttccccgtgattcgatcgccgctcatgccgcttttccccgcatagatcgggtggaaattggtgtaaggcacccaggcggaatcaaagtggatagaggccacgtcgagcgtctgcttgataaaatcggtgttatagagcaggccatcataggttgagttggtgatgaccgcgtgcaccggccaggtggcattttcggtctgcgccaccttctgctcaatgctctcacgggtgaactctcgctggggaataccgcccaaaattccgtaggcattgcgcagcgggcgcagatagattgggatgatattggtcatcatcatcaggtgtgccagtgacttatggcagttgcggtctatcagcaccgtgctgcccgctggcgcagagtacatgccgacaatcttgttggcggtcgatgtaccgttggtgacgatatagctctgctcggcgccgaaggtgcgggcgatatactcttcggcctcgagatgtgggccggtgtggtcgagcagagaacccagttcggtgaccgagatagagacgtccgccttcagcgttttagcaccaaagaagtcataaaacagcgtgccgaccggactttttagaaatgcagtccctgccatatggccaggagtacagaaagtatatttcccttcctcgacgtaattaaacagtgccttggtcagcggaggggtaatctggtcaatatactcatcggtatactgtcgaatgcgtttagcaatatcgtctgcggcattgagcgcgtactcgaagaagtacagcaccatgcgcatgtcgtgtacgctaacgtccatcgtggagtgggtattgataaacgcatagagcggaagatactcattcagctcgttaatttctgaacacagcgctgaactgtgcaaatcccaatcgaaaataacgccacagatacgcgcattgctttcaataagcttgagcaaatcggctctgtcgcgcgggtaaatcgtcttgaagcccaactcgttcagggcagcatccagttcacggatgggctcatctttatagtaaaccccttccgggcgcatgatggcgagaatattcatctgacaaatccttctggtttcctaaaagacaggttatagaccctaacacctcgagacaataaaaaagggcagtcctaagactgccctttaaattttaattgcctggcaaatatccacagtatccgtgatgtaagtcggcggtaacgtcacgaatccccagaaacttacctgagtaagtgactgggtgagcagacgtagccaatcccctacatcgcgaagactgaaggatattagcagtagccgtaagtcatcagtcgctgataacgacggtcacgcagttcttcggtgttcaacgcgtcgagttctctgaggtcagcttccaactgagcacgcagtgatgcggccatagcaggaacgtcacgatgcgcgccacccagtggttcagggatcacggagtcgatcagcttcagctctttcaaacgtgaagcgatgatgcccatagcttccgctgccagcggcgccttgtctgcgctcttccacagaattgacgcacagccttctggtgaaatcaccgagtaggtgctgtattgcagcatgttgactttgtcaccgacgccgatagccaatgcaccacctgaaccgccttcaccgataacggtacagataaccggtacgttgagacgggacatttcgcgcaggttacgagcgatagcttcggactgaccacgttcttcagcaccaacgcctgggtaagcacccggggtgtcgatgaaggtgatgataggcagtttgaagcgttcggccatttccatcagacgcagcgccttgcgatagccttctggagctggcataccgaagttacgacggatcttctctttggtttcacgacctttttgatgaccaatgatcatcacggcacgctcacccaaacgtgcaatcccacctacgatagctttatcgtcggcaaacgcgcgatcgcccgcaagttcatcaaaatcagtaaagatgtgcttgatgtagtcaagagtgtaaggacgacgcggatggcgagccaactgcgcaatctgccaggcacccaaatctgagaaaattttacgagtcagttcgacgcttttctcgcgaaggcgccccacttcttcgtccagattaatatctaatttttcgtcttgacgactgactgcagtcagcgagtcaattttcgcttccagctccgcaatcggctgttcaaaatcaagaaaattcagactcatagcattcctattttagtcaaattccagttcaacctgttcagtacctaccagagaacgtaaatcaagcaacagacgatcggttggcgtaacacgccatgttgcaccaaatctgagccgtgcccgagcgttttctcgttgataatacagatgaactggtatcgtccccgatcgatgaggttccaacgattcgcgcagacggttcaaaagctggtcatcaatttgcctgtcagtcagcgatatagcaagaccacgagcgtatttttcacgcgcttcactgatgtccattaaatcacgggccatcattttaagcccgccgttgaagtcatcaaagctgacctgtcccgtcgctatcaggatacggtctttttccaacaaatgctgaaatttttccaaggcttcggtaaacaacatcacttcaagacggcctgaccggtcgtccaacgtacaaatgccaatgcggttaccccgcttggtcatcatcaccttcgcagccacaaccaaaccgactgcgatggtcatttttccccgttctgtcgggtgcatatctttcaggcgctggccaccgccataacgctcgatttctttcaggtactgggtgatcggatgtccggtcagatacagtcccagagtctcgcgttcaccgtccaataccttttgttcttgccagggcgtaacactggcataagacttctcgacctgctccggctcttcagccagtacgccgaacatgtcagcctgaccgatagcctcggccttggcgtgttgatctgcggccttcagcgcatcgcccaacgagtgcatcaatgcggcgcggtgcggtccgagacggtcaaacgccccggacatgatcagtttctctaaaatgcggcgattgagctttttagtgtccgaacgcgcacagagatcaaacagctctttaaaatagccgccctgattgcgagcttcaatgatagcttcaattggcccttcacccacgcctttgatagcgccgatgccgtaaacaatttccccgtcgtcgttgacgtggaagtggtagaggccgctgttaatgtccggaggcagaattttaagccccattcgccaacattcgtcgactaaccccaccactttatcggtgttatccatatcggccgtcattaccgccgccatgaattctgccggatagtgcgcttttaaccacagcgtctgatacgagaccagggcataggcagcggagtgcgatttgttaaatccataaccagcaaatttctctaccagatcgaagattttcaccgccagttcgccgtcgataccgcgtgacttcgcgccgtcttcaaaaccgccgcgctgcttggccatctcgaccggattttttttacccatcgcacgacgcagcatgtctgcaccgccgagcgagtaaccggccagcacctgggcaatctgcatcacctgttcctgatacaagatgatgccataggtcggctcaagtaccggcttcagggattcgtgctgccactgaatgtccgggtaagacagctcttcgcgcccgtgtttacggtcgataaagttgtctaccatgcccgactgcagcgggccgggacggaacagtgccaccagggcaatcatgtcttcaaagctgtcgggcttcagacgcttgataaggtccttcataccgcgggattcgagctggaaaaccgcggtagtttccgagcgttgcagcatgtcgaaacttttcttatcgtctaacggaatcgctgcaatatcaagaggttcaagacctgtttttgcacgacgcgcgttgatcatattcaacgcccagtcgatgatagtcagcgttcgcagcccgaggaagtcaaatttcaccagcccggcatattccacgtcattcttgtcgaactgggtaaccgggttgttgccctctgcgtcgcagtacagcggcgcaaaatcagtgatcttggtcggggcgataacgacaccgcctgcgtgtttaccggcattacgcgtcacaccttcgagcttgcgcgccatgtcgatcagggctttgacttcttcgtcggcctcataaatctcaggcagctgtggctctgctgcgaaggctttctcgagcgtcatgcctggatccggcggtaccagttttgaaatacgatccacaaaaccgtatggatgacccagtacacggcctacgtcgcggattaccgctttggccgccatggtaccgaaggtgattatctgtgataccgcttcacgtccgtacatttcggcaacgtgttcgatcaccagatcgcgtttttccatgcagaagtcgacgtcaaagtcaggcatcgaaacacgctcagggttcaggaagcgttcgaacagcaggtcaaattccagcggatcgaggtcggtgattttcagcgcatacgcgaccagtgaacctgcaccggaaccacggccaggacccaccggcacgccgttatccttggaccactggatgaactccatcactatcaggaagtagcccgggaagcccatctggttgattacgcgcagctcgacgtcgagacgctcgtcatactccgggcgacgctcggctctcaccgccggatcagggaacaggaactcgagacgctcctcgagccctttcttcgagcacaccaccaggaagtcttccgtcgacatatccccggtcgggaactgcggcaggaagtattcgcctaggcgaatggtaacgttacagcgtttcgcaatctcgacgctgttctgcaacgcctcggggatgtcggcaaacagctcgcacatctcttcttcgctgcgcatatactgctgcgcggtgtaattcctgggacgcttaggatcatcaagggtgaaaccgtcgtggatagccacgcgaatttcatgcgcgtcgaagtcgctctctaccagaaaacgtacgtcattagtggcaaccaccggcaagccggtctcgcccgccagcgcgactgcggcgtgaagatagttttcttcatcaggacggccggtgcggatcagctcgagatagtagcgatttgggaagtattgctgataaaactcaacgcattgctcaacctgcggttgattagaacggctcaggaatttgccgatatcgccgtgacgcgcgccagaaagcagcagcaggccttcgttaagctctgccagccattcacgctcgataatcggacctgccgcgccatagccgcgctggtaagctctggaaatcagcagcgtcaggttttggtagccttgattgttcatcgccaacacggtgagctgggctaactcatcgcccagcatgtcgctgtgtacgttaaaatcggcgccaatcagcggcttaatcccggcgccgtgcgccgagccataaaatttcaccagcccgcaaaggttggtgaaatcggtgatacccagcgcaggcatgccgagagcagccgctcgtttcaccaacgggccaaccttggctaatccatcaaccatggaatagtcactgtgcacgcgcagatgaataaaacgaggttcggccatattcagttaccagaaatctaagagttgctgtgaaaaaacggtgttatcggtctatacgacggccgcttaacgcgacagtagcgcatcttccaacgcacgtcggacaggggcaaaactgcgcctgtggtgagtggtcgcgcccaggcgtgccagctgttcgagatgcgccgccgttggatagcccttgtgtttggcaaagccatactcagggaattccctatccagctcaaccatttcacggtcgcgagtaaccttagccaatatagacgccgcactgatttctgcaacacggctatcgccttttaccaccgcttgcgaaggcattggcagtttcgggcaacggttgccgtcgatcaggacgaattctggcgcgatgcctaatcccgccacggcgcgttgcattgccagcatggtggcatgcaggatgttgagcgcatcaatctcttctggctcagcgcggccaaggctccaggccagcgccttttccttgatttcttcaaacagaaattcacggcgcttttcgctgagtttttttgaatcggccagaccggcaatcggttttgacgagtccagaatgaccgcggcggttaccacggcaccaaccagagggccgcgtccgacttcgtccacgccggcgatgagattcgcctgcgggtatacaaaaatgtctgtcattttcttgccaactccatcaccgcctgcgccgcctgctcgtcggcatcgcgacgaatgctttcatgcagcgtcaggaaagtttgtttcaactggtggctcttctcaccgcccgccagcagcggcagcagtgcagccgaaagtttgtcaggtacgcactcttcctgcagcagttcggtcacgatttcacgaccggccaacaggttaggcaaagacacgtaaggcgtttttaccagacgcttggccagccaaaaggtaaacggcttcattcgataaccgaccaccatcggacacttggccagcatgcattccagcgctgcggtgccggatgccagcagggctgcgtcgctggctatcatcgcattgcgtgcctgcccatcgagcaggtgtgccggtaaatcaggggcaatctcggccttgatacgctcgaactgttcgcggcgtttggcgttaaccagcggcacgacgatgtgcaaatcagggtaagtttgtcgcaattgcagcgccgttttcaggaaatcggcgctcagcatttctacctcggcatgacggcttcccggcagcaacgccagacagtgtacgtcacgaggaatacctaaagtctcacgcgccagctgtttgtcaggatccaacgggatcgagtctgccatcgtgtggccgataaaacggcatgggacattaaatttgtcataaaacgctttttcaaaaggcaagaacgccagcaccatgtcggtggctttaccaattttgaaaacgcgtttttgtcgccaggcccagaccgacgggctgacatagtgaatagtgcgcaaaccgcgctttttgaggcgggcttcgagcctgagattgaaatcaggcgcatcgatgccgacaaacacatcaggtttaagctcggcaaagcgtcgcgtcagctcattgccgatttctaacaggcgtggcagacgcccaagcacttctaccacgcccatcactgcaagctcttccatttcgaaccaggcttcacaaccttctgcctgcattagagggccagcgacccccacaaagcgcgcatcaggatagtggcccttcagagcccggatcaagcccgcccccagaatatcgccggatgtttcgccggcaaccaggccgattgtcagaacgggcttttccatttttttcttaaatccagttgtgctgctaaatcagctcgccgtgatgagcgtttctttaattaacggtgctctgttaacgaatgatgccgcgcgtggagcgggcaaagaagtcgctgaacggctgcactgccgggaactccgcagcaatagctgcaatttccggctgcgactcttcaagcgttttaccgctgcgatacaataccttataggcgttacgaatcgcgtgaagagaaggcttgtcaaaaccacgacgtttcaacccttcgatattgataccgaacggcgtcgcgtggtttccttgagcgataacaaaaggaggtacgtcctgagcaacgccggaacagccgccaaccatgacgtgtgcaccaatgatgcaccactggtgcacggcggtcatgccaccgatgatggcaaagtcgtcaacctgaacgtgaccgcccaaggtcgcattattagcaagaatacaacgattgccgacgatgcagtcatgagcaatatgggcattgaccatcagcaggttatcgctgcctactttagtcagcccgccgccttgaacggtaccacggtgaatggtgacgctctcacgaatattgttgcgatcgcccacttcaacacgtgtaggttcaccggcatatttcagatcctggttgatttcaccgatggaaacgaactgaaaaatacggttgtcgcgaccaattttggtcacgccattcaccaccacatgtgacttgagctcggtgccctcgccaatttcgacctgagagccgatatagcagaaaggcccgatatgaacgcctgcaccaataacagcaccctcttcaacgacagcgctagggtgaataaaggcggttttatcaatcacggattatttctcctgactacgggcgcacatcatctcggcttcacatactacggcaccatcgactttcgccacgccggtgaaccaggtgacaccgcgacgagtcttcttgaactcgacttccaaaaccatggtgtcgcctggaaccactggttttttaaagcgtgcactgtcgatgccagcaaagtagtaaagctcgcctggctcaagtctaccgacgcttttaaacgccagcaggccggtagcctgcgccatggcttcaaggatcagaacgccagggaaaatgggtttgctcgggaaatgtccctggaagcaaggctcattgaaagaaacatttttaatcgcacgcagcgttttgtggggcgtgtattcaacaacacggtctaccagcaagaacggaaaacggtgcggaagcagctcaagtatttctccaataccaaaaccttctacgctaacttcttcatgagagtgatcgttgtgagtaggagtgctcaaaatactcgtcctgtctaatattactgatatcatcaatagcacggcctgcgtgcccctcaaagaggagcattgtgcaggccgcaaatagggactaagaatcgtaaagacgatgaacagtgaaactgaaacatcacattacttattgatttttagtagttaattgttggtgaattagtcttcttcgattttacgctctacggcttttaagcgtttattcatctcgtcgatattcataaccaacgcggcagtcttacgccatgctttgttcggctgtaacggaatcccggaagagtataccccaggttcggtaattggtcgcatgaccattcccattccagtgacaacagccttatcgcaaatttccatgtggccgtttatgacgctggcaccgccaatctggcagtaacgcccaatttttaggctacccgccataatcacaccacctgcaaccgccgtattgtctccaatcacgacgttgtgtgcaatctgacattgattatcaatgatgacaccgttaccaatttgcgtgtcatcaagggcaccacggtcaatcgtggtacaggcaccgatctcaacagaatcgccgataatcacggtaccaagctgagggattttaacccaattgccgcgatcgttcgcgtatccgaagccatctgcaccgatcaccgtacctgattgaatcagacatttctgaccaatttcgacgcgatgatagatagagacattagcccaaatgcgcgttcccgcaccaatcttggcattttttccgatgaaacagcccgcgccaataataacgccgtcgcctaattcaacaccggattcgatcactgcattcgcgcctaccgataccccttgcccaatttttgcttcaggagagatgacggcgctcggagcgatgtcttgtgcaggcgcaggcgtagtatcaagaatttgagccatgcgtgcataagtcaggtacgggtttttaaccactaatgccgcactttggcaaaagggcagatccgcttcggtcaacactacagcgcctgcaaggcaggatgctaactgttcacggtaacggctgtttgataaaaacgtgatttgctcagagtgtgcggaatgcattgaagcaatgccggtgatggcgagttcgccatcaccgtgcaattgtgcatccaactgctgtgcgagatcagccagtcgaattgaagccatgcttatttaacctgtttcagcacttcgtcagtgatgtctttagcatcgtttgatgcataagccagagcgttggcgtcgatgacgatatcaagaccgtcttttgctgcaacagttttaacagcgtcctggatacggcccaggattttgttacgttcttcagcctgacgacgacgattatcattgtcaaaagcctgagcttttgcagagaaatcttcgcggttagccataacttgtttttcaagtttggcgcggtcagcggctttcattgttgaagcgttacgctgcaggttctgcatctgagactgcagagcagtttcctgtgcctgaagtgcggtagcgcgacctttgaattcgttttcaagctgtttagcaacagcttcacgagcaggcatttgttggaaaatttgctgaacgtttacaacaccaattttatcagcagcctgaacgctagctgaagcagccataactaatccgaggcctgcggcgtataaccactttttcactataaactccttccatcacccgtttgtgccagatggcacagtcaattacgcagagggcctgagaagattattatcactcaggcccaagcgattctgctgattaaggcttataccctgatacctggggtataattccgtaacagattaccacgttttaccgatgttaaactggaactgttctgccttatcaccttcatatttcttaaccggctgtgcataagagaatgacagaggtcccaaaggagactgccattgcaatgccacaccggaagaaacacggatattacctggtttactgtagtcaggaacaccggcagcgatagtctctggggtgttctcccagttggtatcccaaacggtgccgctgtcaacgaacacagaggtacgcagcgagttagcgtatttgtcaccgacaaatggcgtaggaacgatcagctcagcgctgagaagtcccatcgcgttaccgcctaccgcatcactagagttgtcgattggacaatctttatatgaggctgcaccggttgcacagttgtaataagccgctttaggaccgatggtattcgactggaaaccacggacgctgcttgaaccaccggcatagaagttgtcgtagaacggcacttctttgccacccaggccgtcggcataaccggcgcgggcacgtcccatcagcacccagttatgactctgcgtcagaggcaggtagctggtcgcatcgaaggtgactttgtagtattcgttggtcgaacctggcacggtaactttacccgtcaggctggctttactccccgccgttgggaagaagccacggtcaaggtcgttataaccccagcccagcgtcaggaagaagtcgttggcgctgtaggttgcatccgaagtgttttcaccggccacaacgctcgggttcacacccacgctgttcaggtaacggaacattgccacctgcggttccatgttcgacaggtcgttatggacgtagtcgagacccagacgcagggagttgttttcgttaaccgggaagcccaggttgccgccgataccgtagctcttgttggtgtactcggacaggtctgcatcatctgctttgaagtcattgtagaagatgcgaccgcccaggctcacgccatcaaccgtgaaatacgggttggtcacggtcagctcggtataggtctggtagtcgtttttggtgccggtaatgcctgcctgatagccggtacctaaccagttatcctgctggacgcccaccgtgaagctcacgccgctctcggagccatagcctacgccaaagttgaaggtaccggtgttacgctccttcactttgtaaactacgtcaacctgatcggttgtccctggcacacgttgggtttcgacgtcaaccgtatcgaaataacccaggcggttcagacgatctttacctttatcgaccaggtcgctgccgagccatgagccttccatctggcgcatttcacgacgcagcacgctgtctttactggtgtcattgccttcgaaacgaacgtgacggacatagtaacggttacctgcgtcaacgttgacgtgcaggataactgttttgtctttgtcgttgatttcaggctgcgtgttcaccgtaggatacgcatatccgtaacggccgagcatcgctttgatgtcattttcgatcttggtcactttggcaccgctgtaaagctcgccattgttgattttgctcaggctttcgatttcagccgagtgaccctgcatgttgcccgcaacttgcacaccggtgactttgtactgatcgccttcgtggatgttcagggtgatgtagatccccttcttgtccggcgtcaaactgacctgagtcgagtcgatgttaaagcgcgcgtaaccgcgatcgaggtagtagctgcgaagggtttccaggtcaccggaaagcttctgcttctgatatttacgatccccaataacgttccaccacggcacttcgtcgcgcagctggaactgagaaactaattgatcggtgctgaaagcgtgattaccgacgatgttgatctgctgaatttgcgcagagacaccttcggtaaagaccagtttcaggtcgacgcggttgcgaggcagaggcgttacaacggctttaacagacgcgctgtatttacctacgctgtagtagaagtcttccagacccttttcgatattggagacctgggtacggtcaagcgcttcgccaacccggacgccagaggcctcaaggttttgtttcagcatgtcatctttcacggctttgttgccggagaaggtgatgctggcgatagtcgggcgctctttgacttgaacaatcagcgtgtcaccatcgcgcaggacgcgaacgtcctcaaagttgcctgtggcaaacaatgcacgaatggtattactgatatcatcgtcggtgactgtatcccctacgcgaaccggcatattgagtaacgccgcaccgacggcaacgcgctgcaggccttcgaaatgaatatccttcactacgaatccatctgcaccgtatacggttgcgctgccaaacagcagcgacgctatgagcaactttttgatcgccatcgttgttatgcgttcttcctaacctaatccccagccgttaaagacgggagaaatcattgaaaagtgcaagccccattaataacaccagcaatacagagccaatgcgataactgaagtcctgaactcgctcggaaactggcccaccctttagcttttctattgccagaaacagcaggtgacccccatctaacaccggtaatgggaacagattgatgataccgagattgacacttatcaatgccaaaaacatcaggtaatacacaaatccatattcagctgataaacctgcaccctgtgcgatggaaatagggccactcaaattattcagcttcacatcaccggttattaacttgcccagcatattgaccgttaatttcatgagttgccaggttttatccccagcttcataaaacgccacaaacggaccatactggcgaatcgttttatactcgtcaggcagtggaataatttttgggaccacgccggcaaaaccctgcgcctgtcccttacccactgatttagtgtctggtattagcgttaagttcacaggttgcccattgcgctcgatttccaacgccatcgacttgcccggattatcgcgtacctgaatggcaaaagcttgccaacttactaaaacctgaccatcaactttaactatcctgtcgcccgcttgcaaacctgccttctgcgcagcggagtcagcctgcacctgagccagaatagattctatctgcggaccacggggaataatacccagtgatacaacaggatcctgcttttccgggtcgaagtgccacgccgtgagatcaagctgttttacaacaacttgagacgagccaaagggggcaatcccgacggtagttttcgcgtctccaatttcgccgatcaacgccatgcgaactgaatcccaatcaggcgtttcgataccatcaacggacttaagttccattccgggcaaaatattggactgtgcggcaatagaatgtggggcgatttcgccgacgaccgggcgcaggctcgggacgccgataatgaagaccagccagtaggcgaaaacggcaaagatgaagttagcgatggggccggcactgatgatggccgcgcgctgccagacggttttgttattgaaggactgatgacgatattcgggggcgactgcctcaacgcgctcatcgagcattttgacgtagccgcccagcgggatcatggccaacacgtattccgttccttgcttgtcggtgcggcggaaaatagcgcgcccaaaaccgacagagaaacgttcaacgcgaacgccacagcgacgagcaacccagaaatggccgaattcgtgcacggtgattagcacccccaatgcaacaataaaggcggccaggctccagagtatgttcatcataatcccaactattccttaaaaactgccgcaggcataaaggttaatacaccaacagcatgagacaagcaaaaaccggcaccgcagcggtcaggctgtcgatacggtccatgatgccgccatggccgggtattaagttaccgctgtctttaatccctgcttcacgtttgaacatgctttcggtcagatcgccaagaaccgatgccaacgtcgcaatgacggagcaaatcaacagggttgccggtgcaacgttcaacggtacataacgaccaaacagccatgatatcaaagccgaggtcaacagaccgccaatcaacccttcccaggttttacctggcgagactttcggggccagcttgtgcttaccaaacagcttgccaaacatgtaggcaccagagtcggcaccccataccagcagcatcacgtagagcagccaccaggcgccgttgtaatggttttcagcgtagccgtaaaggcgcagcgacagcataccccagaagaacggaacaatggtcaataaaccgaaaatcagcttcaacggacgtgagttacgccacgctgcggcagaaccgggatacaaaacgaccaaaataaacgctgcaatccaccaggctagcgacagccagagcgagccactaatctgaatcagatgaacagactgctgataagccggaagacttagcatcatggcggcaagcaggaagccgcagagaatagctaaccacacgcgctgtgtgcgtgatttaaatccggcaaactggccccactcccacgctgctaacatgcaaacgacgatagtgacgacggcaaagccgacgggcggcagtaaaaatagagcggcgatgacaatgggaatcaaaatcaaagctgtgataatgcgatacttcagcaaaagttctccctaggacgcattggcgccgataggtgtagtccccccgaagcgacgctcgcgttgtgcaaaagcattcagcgcaccttcaaagacattttcatcaaaatccggccagaggacgtcggtaaagtaaagctctgcataggcaatctgccacagcaaaaagttactgatacgatgttccccaccggttcggataacaagatcgacgggtgccagttcgctcatacagaccgatgcacctaacgcctcttccgtgatttggtccgcccgcagtgtaccagcttcaacctggcctgccagcttctttacgccttcaataatatcccatcgcccaccgtaattggcagcaatgtttagcgtaagcccatcgttattttgtgtcagcgtttccgatttacggatcatgtcctgcaaacgtgagctaaaacggctgacgtcgccgataacccgtaagcggacattgtgtttatgcaaactttttacttcactgcttaacgcacggacaaaaagctccatcaaagcagaaacttcctgaatcgggcgattccagttctcactactgaaggcataaagcgtgagcgcatcaaggtgatggcttgcagcaaagctgacagccttgcgaacggactttactcccgctttatgaccaaagacccgcatttttccctggcgtttcgcccaacggccatttccatccataataatggcaacatggcgcggtagcagacaagttgtatcagtcatttgttgattctcgagcgacataacccgtactctttcccttcagctagaattaacgacgtcacctgtaaaccctgcattcgcgtgcatgatgaagcgtgcgcgtaaaaaagccgtgaaccctatcaggcacggcttcacctgactaccaacgtacttaaaaatgagtagtacggccatgaaacgcaatttcgcgtcgtcaggaggcgcagactatatcatttcaacgttgttcgaacaaacgacctcattcattgacgtataattttacagagtaaatgactgtaataacaatgatgaggcctctctcgcagagcggtctatttccaaaacctcttctacgcagcttggctctccgggcaaagttttatccatgacccgatgattgagtttggcaatatcggtaaagcgaattttccccgccaggaatgcagcaaccgaaatttcattagcggcattgagcgccgtggttgcagcctgaccagtacggctggcctcgatggccaattttagacacggataacgctcgtagtctggctcgctgaaagtcaatgcgcccattttgcagaaatccagaggctcaacgcccgcagcaacacgctgtggatacgccatggcgtgggcgattggcgtacgcatatccggcgaacccagttgagctaatacgctgccgtcgatgtagcgcaccatcgagtgaatcatcgactgtgggtgaatgatgacttccatctgctccgctgaagcgttaaacagccagcgagcctcaatatactccagacctttgttcatcattgtggccgagtcgacagaaattttccgacccattgaccaatttggatgcgcgcaggcgcgttcaggcgtcacgtcggcgaactctgacagcggcagttcacggaaaggcccacccgaaccggtcagaataatgcgcgacacgccgttgtcttgcagagatgcgtaacccagctgttgctgaatagtttccggcaggctctgaaaaatcgcgttatgttcgctgtcgatgggcaacagctgacttttattttcacgtactgcatccatgaagatgcgaccgcaggtcaccagcgactctttgtttgccaacagaacgcgtttaccggctttgacggcggcaagcgtcggcaacaggccggcggcaccgacgatggcagacatgacttgatcaacctcatccagcgcggccagttcgcaggcggcattcacgcccgacatgacctgcgtcttgctcccctgctcttttagaatctctctcagcgcagcggccgatctttcatccgccattgaggcgtacaaaggagagaactcgagacactgctcggccatgacctgaacattgtttcctgcgaccagcgcacgcacggcaaaggcctcagggttggaccgcacgacgcaaagcgtgctaatgccaacagaacctgttgagccaaggatagtcagttgcttcatgaaggtactcaatatagcgaaagtcattatcggaggtgacacagtctgttactcattcagccacttgtctatcagattcaagcaccaaatttcatgtgtcacaacgacgggatagggcccattttattgattaatacttaatttacaattaactgtagggcttttataagaaatgttttttcaaaaaaataaagcgccgcatttgcgacgcttcaggtaatacgcagagatagattagaaatccatcaactcggcttctttatcagccagcgctttgtctaccgctttgatataagtatcagtcattttctgaatgtcgtcctgggaacgacgatcttcgtcttcgctgatctctttgtctttcaggagtgctttcactttatcgttagcgtcacggcgaacgttacgcacagaaacacgaccctgctcggcttcaccgcgcacgattttgatcatgtctttacgacgctcttccgtcagcggaggcagtggaacacggataacgctaccggcagacatcgggttcagacccaggtcggacgccatgatagctttctctaccgctgcgctaacggaacggtcgaatacggtaacagccagggtatgtgcatcttctgcaacaacgcttgccaactgacgcagcggagtggaagagccatagtagtcgacatggataccatcaagaatgcttggctgtgcacgaccggtgcggattttgctgatgttatttttgaatgcttctacgcattttgacatgcgggtatcagcatcttttctgatttcattaatcacgttgcgaacctttggaaacgggttacttggcagaccataactttattatagtccgtgaatattcaaaacggtcttctaataaacgacaggttactcgccgctggagatgagcgtaccttcgttctcacccatgacgacgcggcgcagagcgcctggtttgttcatgttgaaaacgcgaatcggcaggttgtggtcgcgagccagcgtgaaggcagcaaggtccatgactttcaattctttttcaagcacgtcctggtaagtcaggtgatcgaacatggtcgcgtccgggtgtttaaccggatcggcagagaagacgccgtcaactttggtggccttgagaaccacgtcagcttcgatttcgatcccgcgcaaacaggccgcagaatctgtagtgaagaatggattgccggtaccggctgcaaagattacgacacgattgttacgcagcaggctaatggcttctgcccagctgtagttgtcgcaaacgccgttaagcggaatcgcagacatgaggcgcgcattcacataggcacggtgcagtgcatcacgcattgccagaccattcattacggtggccagcattcccatgtggtcgcctacgacgcgattcattccagcttgagcaagaccagcaccgcggaacaggttcccgccgccaatcacaacacccacctggatgcccagctcaaccagctctttcacttcctgtgccatgcgatccaaaacgctcgcatcgataccaaaaccttcactgccctgcagggcttcgccactgagttttagcaggatacgctgataaacgggtttcgcattggtagccatggtgtctgtcctaagaagcaatgtgtcgtaatgggatggtcgttttttttgcatcacaagtcctgtgatgtcatcagacatcaacttatctgcctgattaaactagtagaggataacctctgaggtattttttaaggccggataaaacggaaccgccagtttcagcggttccatttttacatcaatccagcattaagactgtttgctcattgcagcaacttctgcagcaaagtcagtctcagctttctggatgccttcacccacttcaaagcgaatgaagttagtcacgtcagcgttgtgctctttcagaacctgagcaactgatttgcttgggtcgataacgaaaggctgacccgtcagagaaacttcgccggtgaatttcttcatgcggccttcaaccattttctctgcaatttcttttggcttgccagactgcatcgcgatgtccagctgaacctggtactctttttctacaacttcagcagacacgtcttctggcttaacgaattctggcttgcttgcagcaacgtgcatagcgatttgcttaaccaggtcttcttcagcgccagtagcagcaaccagaacaccgatgcgagcaccgtgcaggtagctacccagaacgtcgccttccagtgcagcgatacggcgaatgttgatgttctcaccgatcttagcaaccagagcaacacgctcttcttcgaactgagctttcagtacttcaacgtcagtgattttgcctgcgaaagcagcatccagcactttgtcagcgaaagcctggaaaccaccatctttagcaacgaagtcagtctggcagttaacttccaggatcagaccgtagttgccttcgactttagttttgatcacgccgtcagcagctacgttgcctgctttcttagcagctttgatcgcgccagatttacgcatgttttcaattgacagctcgatgtcgccgttagcttcaaccagcgctttcttacaatccatcatgccagcgccagtacgttcgcgcagttcttttaccagggcagcggtaatatcagccattgtagtttcctcgattatcccagtgcaaaaaggcttttgcattgagatatttctcgcatttaagataagcaaaggggccaattaaggccccctaaccaacatattcaatacctggttaataagggctgctgtgagccttccttattattcagcttctacgaagctttcttctgcctgaacagccagatcttgagaacggccttcacgaacagtggcagcaacggcgctcaggtacagatttactgcacggattgcgtcatcgttaccagggataacgaagtcaacgccatctggatcagagttggtatcaacaatagcgaataccgggatacccaggttgttagcttctttgattgcaatgtgttcgtggtcggcatcgacaacaaacagtgcatcaggaagaccacccatatccttgataccgcccaggctattttccagcttcgcaagctcgcgagtacgcatcagagcttcttttttggtcagcttttcgaaagtgccgtcttgtgattggatttccagatctttcagacgtttgatggactgacgaacagttttccagttagtcagcatgccgcccaaccagcggtggttcacgaagaactggtcgcagttgtttgcagcgtcttttaccgcttcgcttgctgcgcgtttggtaccaacgaacaggatcttacctttacgggaagaaatcttggtcaactcagccagagcttcgttgaacattggtacagtcttctcaaggttgatgatgtgaaccttgttacgagcgccgaagatgaatggcttcattttcgggttccagtaacgggtttggtgaccgaagtgtacaccagccttgagcatgtcgcgcatggaaacagttgccatgataaaacctctatagtaaatgtttgggttatgcctccacgtatcccatgcaaccgaccccgtaaaaagccatccgaagaaggcgattccagagcaccccggcgcaggtgtcgatacgtgtgtgttattacttattgaatgaataataagtacacaaatgagtgagtatttggctcatccaccttttgtctgcaaagacaatacagtgattgccggcgcgctttataccataaatcacggtaagaaaccaactaaacttacacaaaggcgcggcggtagaatgataatttggcagctcagaactgggctgataccataagacctagctaattattgacgacccgcaggcataaataaaggctgtttaaaccaggctcgtcaaaaaactcgacaccagcaggattctttcatggcaatttcaatcaaaacacctcaagacatcgaaaaaatgcgcgtggccggacgcctcgccgcagaagtgctggagataatcgagccacacgtcaaacctggcgtcaccacggctgagcttgaccgtatctgccacgagcatattactgtgaagcagcaggcaattccggcctgtctgggctatcacggcttcccgaaatcagtgtgtatttccattaatgaagtcgtctgccacggcattccttccgatgaccgtgttctcaaagacggtgacatcgtgaacatcgacgtgaccgtgattaaagacggcttccacggtgacacctcgaccatgtttatcgccggcaagccgaccattctcggcgagcgcctgtgccgcgtgacccaagagagcctgtatctggcgctgaagatggtcaagccgggtattcgcctgcgttcactaggtaaggcgattcagcagttcgtcgaaggtgagaaattctccgtggtgcgcgaatactgcggccatggcatcggtgaaggcttccacgaagagccacaggtgctgcactatgatgcagacgacggcggcgtggttctccaaccgggcatggcatttaccatcgagccgatggtaaacgccggtgactatcgaattcgcagcatgaaagacggctggaccgtgaaaaccaaagaccgcagcctgtctgcgcagtatgagcacacgctcgtcgtgaccgacaacggttgtgaaatcatgaccctgcgtaaggatgagactatccccaacgtcctgacgcacgaaaccacggcggcgaactaatcccgaagaatgcatacaggccggctatttttgccggcttttttatcagagtgtcctgtcgtcttattttataaatccgtgggctacgcacttatgtctgattcgtttctgtctaaaaaccttattcatctggctttgccgctgccggtcgagataactcgcgcgtttcccgataagccccttcaccctcctcctatgccgatgaagagctgaaccgtcagtctctaaaacagcacatggatgaattccagctttggctggcagaggcgtttaactgcgggcaacgcgttgaagagctggttgccgcgcgcgcgctttacatcgaccagatgctgcaacgcctgtggattttctacggcttcgataaaatccccgagacggcgatggtggcagttggcggctacgggcgcggcgagctgcatccgctgtcggatatcgacgtcttggtgctgagccagaaacgcctcaacgacgaccaggcgcagcgcatcggtgaactgattaccctactgtgggatctcaagctcgaagtgggtcacagcgtgcgcacgctggaagagtgcatgctcgaaggccttgccgacctcaccgtggcaaccaacctcatcgagtcgcgtctggtctgtggcgacgtcgccctgttcctgaacatgcaaaagcatatctttagcgacggattttggccctctccgaccttctttcgcgcaaaaatcgacgaacagaacgaacgtcatcaacgttatcacggcaccagctataaccttgagccggatattaagagcagcccaggcggactgcgcgacatccataccctgctgtgggtcgctcgccgccactttggagcaacgtcgctcgacgaaatggtcagcttcggcttcctgaccaaggccgaacgcaacgaaatcaacgaatgccagagctttctgtggcgtattcgcttcgccctgcacctgatccttaaccgctacgataaccgcctgctgttcgaccgccagctcaacgttgcccaacttttgcagtatcagggcgaaggcaacgagccggtcgagcggatgatgaaagacttctatcgcatgacgcgccgcgtcggcgagttgaatcagatgctgctgcaactgtttgacgaggcgattctggccattggcccgaacgagaaaccgcgtccgctggacgacaacttccagctgcgcggtgacctgattgacgtacgcgacgagacgctgtttgaccgcgagccgcaggcgatcatcagtatgttctacctgatggtgcgccaccgcgagataaaaggcatttactcgaccaccgtgcgtctgctgcgccgtacgcgccgccaccttcaaacgccgctgtgcatgattcccgaagctcgggagattttcatggcaatcctgcgccaccctggcgcggtcagccgtgcactggtgccaatgcatcgccacagcgtgctgtgggcctatatgccacagtgggggctgattgtcggtcagatgcagttcgacctgttccacgcttataccgtcgatgagcacaccgtacgcgtgctgcaaaaactcgaaagctttgctgatgagaacacccgtccgcgtcatccgctttgcgtcgatctctttcctcgtctgccgcagcctgagctgttgctgatggccgcactgttccacgacatcgccaaaggtcgcggtggcgatcactcggtgctgggtgcgcacgacgcacaggaattcgccgagctgcacggcctgagctcgaacgacagccagctggtttcatggctggtgcgctgccatctgctgatgtcggtcacggctcaacgtcgtgatattcaggatccgaacgaaattcagcagttcgccgctgaaatgcagaccgagaatcgcctgcgttacctggtctgcctgaccgtggccgatatctgcgccaccaacgagaccctatggaacagctggaagcaaagcctgatacgcgagctctatttcgcgacagagaaacagctgcgtcgcggcacccaaaacacgccggacctgcgcgagcgcgtgcgccatcatcgtctgcaagcgttggcgctcctgcgcatggacaacatcgacgaagagaagctgcaccatatctggagccgttgccgctccgactatttcctgcgccatacgccgaaccagttggcctggcacgcgcgtcatctgctcgaccatgattcgaccaaacctctggtgctggtcagccatcaggctacgcgtggcggcaccgagatcttcatctggagtccggacaaaccctacctgtttgccgctgtggccggtgagcttgaccgacgcaacctgagtatccacgacgcgcagatcttcaccaaccgcgacgggatggcgatggacacctttattgtgctggagccggacggcaagccgctggcacaggaccgtcacgaaacgacgcgctttgcgctcgagcaggcgatgctacaggcttatcaaccgccacgcgcgcgtcgtccgtcgtcaaaactgcgtaatttcagcgtgccgaccgaggtcagcttcctgccgacgcataccgatcgcaagacctatatggaactggtcgcgcttgaccaacccgggctgctggcgcgtgtcggtgaggtgttctcggatcttgggctgtcgctgcacggtgcgagaatctctaccattggcgaacgcgtagaggacttgtttatcctcgccaacagcgaacgccgggcattagacaagcaaacacgtcgagaaattgagcgaagattaactgaggtgctcaacccgttcgataaagtatgatacaagtaacgcttggctttttttctttcaacatcactatcagacaaagagaacagtatggaattacaaaccgtcattgagcaggcattcgaacgccgtgcagacatcactccggctaacgttgacagcgaaacacgcgacgccgttaaccaggttatcagcaagatcgacagcggcgaactgcgcgttgccgagaagattgatggcgaatgggttacgcatcagtggctgaagaaggcggtactgctctctttcagaatcaatgacaatgaagtgatggaaggcgcggaaaaccgcttctacgacaaagttccaatgaaatttgccgactacgacgaagcgcgcttcaagcgtgaaggtttccgcgtagtgcctcctgctgccgtacgtaaaggttctttcatcgctcgcaacgtggtgctgatgccttcttacgttaacatcggcgcctacgttgatgaaggcaccatggttgatacctgggccaccgtgggttcttgcgcgcagatcggtaaaaacgttcacctgtccggcggcgtaggcatcggcggcgttctggagccactgcaggctaacccgaccatcatcggcgacaactgcttcatcggcgcacgttcagaaatcgttgaaggcgtcatcgttgaagacggctgcgtaatctcaatgggcgtttacattggtcagagcaccaagatttatgaccgcgaaaccggcgaagttcactacggtcgtgtgccagcaggttcggtggttgtttccggcaacctgccttctaaagacggtaaatacagcctgtactgtgctgttatcgtgaaaaaggttgatgcaaaaaccttaggcaaaaccggtcttaatgagttattacgttctatcgactaaactgaagaagcgggttaattaacccgctttttttaaggtattttcggcgtttcacgtatgagcaataagtttaaaacaaaaggatggtgctgctatgtatgacaacctgaaaggcctggggattaacaatcctgatgacgtcgatcgttataatctgcgtcaggaagcaaataacgacattctgaagatttattttcgcaaagataaaggcgagttttttgccaagagcgtgaagtttaaatacccacgccagcgtaaaaccattgccgccgacaacgcgggtcagggttacaaagagattaacgagattagcccaaacctgcgctacgttatcgatgaactggatcagatctgccagcgtgagcagattgaagtcgacctcaagcgtaaaatcctcgacgacctgcgccacctcgagtccgtggttgccaacaagattaccgagattgagtccgatttggaaaaactgaccagcggccgctaatcagttgcattagagcctgtaatgttcaacgttatcaataccctaaaatttcgagctgcaggaaaacacgttcatctgcagttcgaaatattatgggcagcgaactaactcaattgagtggcccacttttctacccatggcatagcgacaatttctggctccggctgctcaatagcatcgatctccagcatctcaccaatacgttttgcaccctgctcctggagcaaattgtccatcttgtggccaccgccgcagaagaaatcatagctgctgtcacccagcgcaatcatgccgtaacgcagttccggctggtatccgacttggtcgcggatggcatcaaacaacggcgcgatgctgtcaggtaaatcgccctgacccgtagtagaagtaatcaccagcacgaagtgatggcgataatattgccaggcctcaagagtaccctcttcaaagacctttacctgatgcccgcgttttttgagcaaggtttctgcttcttcagctaccagcaacgcgtttccatacacagtgcctacgaaaataccaatctcagccatgaccctaactccctaactttaacccaaaattgtcaactatcctgactcgcctgcgcaggaaactcaaccctttccagctcgctgacacagcccttccagtcaaaacgctcgaccagctgctgccagcgagggtcccaaggggcggtcaacgacagggcttcaccggtgacaggatgcgtcaggcgcaggtggctagcgtgcagcatcaggcctgggcattcgaaatgctgcgccattccgcggttctgcttcaaatcaccgtgtgcggtatcaccaataatcggatgacgcagatggacatatggcgtcgcagctggtgcttgcggcccgtttccggcgtcaactcaaccaagctgtagcgggcggtgtcataacggccaatcgcaacaggcatctcgcgacgcgctaacacccgataatggcttaccgcaggctgtggggctttttccccttccgaaaatttatcggcaatcttgtcaagctcttcggtaagcgcatagtcgacagtgccgtcttccagcacataaccacgcacgacggcgtgataaaccttaatcatctgatgctgttcaaactgctgagacagcattcgtgcaacgtcactcgacagcgcaaacaacagcacgcccgaggtgggtttatcaagacggtgtacggtaaatacgtgctgaccaatctggtcacgcagcgtctgcataacaaaaacggtttcatgccggtctagccaactacgatgaaccaacataccggcgggcttgttcaccgctatcagatgctcgtcctgatacaaaatttccagcatgtcagtcttctatattcagtaaatcgtcgaggcgctgtagcgcgttatgcagcttttccattcccggcatcgccacttcataataaggcgtgatggcaaaacgagtcggcaggttggcctcggcggccagcagagcatgcatacggggataagcacccactgtaaccactgctcggcggacatggtatcgacggcgaacggctctttgctatcaaacgcttcgggctctggcggcataggttgccacaaagacaactcacgcataacttgctcaatattaagcaatatttcgcggacctggttttctatactcatcaatcactctctgcattgcatacgtgcgggttttggatagcgcgccgaaaaggggcaaagcatagcactgaagccgcaacgccccaagtttcaactcgctggacgaaactctctcgttgtctctactaagcatagcctccatcaatcaactatcagtttttcatactggtactgtgtgattgctacgggcaaaataggcgcactttacataaattgactttaaagatgcctgcaaactcaataataacgcccaaaaaacacgccacgcccatgaaagcaatgatcgcttccgtgtcaggctatgcaatggacggctttgacctgttgatcctcggattcatgttgcccgctatttcaagcgagctggggcttactgcatcacagagcggttcgctggtgacgtggacgcttatcggcgcggtgattggcggcgtgatttttggcccgatcagcgaccgctttggacgcatacgcgtactgactttcacaattttgatgttctcgttgtttaccggcctgtgcgccgttgcccaggggtattgggacctgctgacctatcgcactctggcgggcgttgggcttggcggtgaatttggtattggtatggcgctaatcgccgaagcctggccgattgagaagcgtaatcgtgcctctgcttacgttggcatgggctggcagctgggtgtgctgatggccgcgatcctgacaccgctgctgctcggtactattggctggcgcggcatgttcctgatagggcttgtgcccgccctcgcctcctttcttatccgccgtagtatgggcgagcccgaggaattcgttaagcagtcctctaagcagcagcaggagcctttattgactcgtttagcgctgctgttcaaggaccgtgcgacccgtcgatgcagtatcggcattctgatcctctgttcggtgcaaaacttcggctattacggattaatgatttggatgccaagctatctgtcgaaaaacttcggtttttcgctcaccaaatccggcatgtggaccgccgtcaccgttatcggcatgaccttcggtatctggctgtttggcgcattgtcagaccgctttgcacgctggaagattttcgtgatttatcaggtcggtgcggtggtgatggtggtgtgttatgcccagctgaaagacccgacggcgatgctgtttgccggtgccgtgatggggatgttcgtgaacggaatgattggtggctatgggggcctgatttctgacggctacccggtcaatgcgcgcgcgacggcacagaacgtattatttaatcttggacgcggcgtaggcggttttggaccactggtgataggtatgctggcgtcacaaatagcctttaccgcggcgattacactgctggcggcaatttacctgctggatatctatgcgacgctgttcctgctgccaaaagcgcaaagtaagaaagaagacacgctgggtgcaataggctaatagtggcttagtgagggaaattggcaagatagagacaaaaagttggggtactgttttcacagtaccccggttcgttttatagcaatccagctacctgtgtgctccctgctcgttccttgaaaacttgtcctgcggtcatcctaaccagccatccgttgcatcgtcctactttcatcctgacgtatcatcctagtcgtcctgactttcatcctttagtcttcctgacccaccaaacttcctgttttggctctcaatctccgtcctggaggtgtcccttgtttcgtcctgaaacatcctggcataatccgatgccgtcctgactcatcctgagcctttcccctacttgatgaaaccgccatcatcctaatgttcagtttcatgtcttcctttcgacacaggtagaatcgtcgattttgcccgccgaggcaaggctagcactcaggcttacagcagggtaggacgtataaacagtaggtcttattgaatcaacttaatgattttaattgatttttataattacaaagaaaattattagcagtaaatataagagatctcttacagcgtttgtgagagatctctcacacgtccgtaagccaaatttcccatgcgctcagtcagggatttcgagggagcagcattgtaaggaattcggataacgaagacgagagaatcgttctttttttactgccaaattgctcgagcaatacctcgccactgaggttacagagcgagatgagcattaattccgaatcggtagtccccagaaaaagggtcggagaaagcttgagacgcttttgcgtcagcagatgcccaatcagattctcctgcaggcgaataaaatcgtcttcactccacacctgcaccaaattgaatgagtgctcgagatagcttgcactcatatcccggaaaactgcgtggtgaaatacgcatgggcctcgggacgcagttgaatatcgagcgcacgttcaacgttgttaagcgcggaaggtggcgtaaaaggctgaggaagccaaaacacttcattgtcgctgcttcttacggcacagggtgacgccacaccgaacaactcttcactggcgggttcatgaccggtttgctgctgccacagctcaacataacgttgggtaaacccgcgcagggcgtcggaaacatcaaggtccatattttttctcatcttcagggtcagcagtgcgttaaactaggagaatacgcaattcgttttgtattgtaccaatctcttatcaaggtgacagcatgtcctcctatcaggataaccccgctctttctcaactgacactaggcaaagcgacgccttatcgcgaccaatacgacgccactctgctgcaagccgtgcctcgcagcatgaatcgcgaaccccttgggctatttccggactctctgccgttccacggcgcagacatctggacgatgtacgaactctcctggctaaatgccaagggtctgccgcaggtcgccgtcggtgaaatcagcctgcaagccgatagcgtcaatctcatcgagtcaaagagcttcaaactgtacctcaacagcttcaaccagaccaaattccaggactgggacgccgttaagatgacgctcgaaaaagacctgagcgcctgcgctcaaggcagcgtgaccgtcagtctccgcgccctgcacgagattgaaggcagcccaatcggccgcttcgccggtatttgtatcgatgctcaagatattgaaatcaccgattacggcttcagtaccgattatctccaggacgccaccagcgacaaaatagtcgatgaaacgctggtcagtcacctgcttaaatcaaactgcctgattacccatcagcctgactggggttcagtgcagattcagtatcgtgggccagccatcgaccgcgaagctctgttgcgctatttggtctcattccgcaatcacaacgaattccacgagcagtgcgtcgagcgcatttttaacgatctactgcgtttctgccaaccgacgcgtcttgcggtctatgcccgctatacccgccgcggtggtctcgacattaacccgtggcgtgccaatttcctgtttgagccgacaaccgcacgccttgttcgccaataaggcccgactttgctcaagaactgagctgtcgagcgacgaccaatggtaaaagcctatggacaggtttactgttaaagcataacaagcacgcaagacatcattaacgcggcgttaataaggagcaactttgattacacatatcagcccacttggctcaatggatttgttgtctcagttggaagtggacatgctcaaacgtactgcgagcagcgacttatatcgcctcttccgtaattgttctttggcagtcttgaacagcgggagccagaccgacagcagtaaagagctgcttgaccgctttgaaagctttgacatcaacgtgttgcgtcgcgaacgcggcgtaaaacttgaattagtaaacccgcccgaagaggcgtttgtcgacggacgtattattcgctcgctgcaggccaatctgtttgccgtgctgcgcgatatcctgttcgtcaatgcgcagctcagcaccgcgggccgatatcaggacctcgacacaggcagctcggtgtacctcaccaatctggtgttctctatcctgcgcaacgcccgaacgctacacctggacgaagatccgaacatggtggtgtgctggggcggtcactcgattaatgaaattgagtaccagtatgcgcacaacgtcggtaaccagttaggtctgcgtgaactcaatatctgtaccggctgtgggccgggtgcgatggaagcgccgatgaaaggtgccgccgtcggtcatgcaaaacagcgttacaaaaatagccgctttattggcatgaccgaaccgtcgatcattgccgcagagccgccaaatccgctggttaacgagttggttatcatgccggatatcgaaaaacgccttgaggcctttgtgcgtattgcacacgggatcatcatcttcccgggcggcgtaggtaccgccgaagagctgctttatctgctgggtattctgatggatccggccaacagcgatcaggttctaccgttgatcctgaccgggcctaaagagagcgccaactactttaccgtgctggatgcgtttattcgcgaaacgctgggtgatgaagcgcagaaacactacaccattatcatcgacgatccgattgaagttgcccgtcagctgaaacgtgcgatgccattagttaaagagaatcgccgcaatagcggagatgcctacagctttaactggtcgattcgtatagcacccgatctgcagctgccgtttgagccaagccacgaaaacatggcgaatctcaatctgcaccccaatcagccgccggaacagcttgccgctgcactgcgcagggcgttttccggtattgttgccggtaacgttaaagaggttgggatccgtgctatcgagaagcacggccgtttcaagctgcatggcgacccgcaactgatgaaaaaaatggacagtctgctgcaaggttttgttgctcagcatcgtatgaaactgccgggtacggcctacgtaccttgctatgaaatctgttcctgagtctagcgctcaggggtctcgtcacctagcctttccccgctgaagaagtggggaaagtgttttactgggcgaatcctcgcaatttataactgcaaagcaccgcaagctcacgtctgcggtgccatctccccgatttactgataccctcttgaaatgaaaattcacttactaatcattgacgcactgaatttaatcaggcgcattcatgctgtacagggttctccctgcgtcatcgcctgccagagcgccgttaaccagttgattcaacatacgctaccttcccacgccgtcgccgtgtttgacgaagacgatcgtcatgacagctggcgccaccagtgtctgcccgactacaaagcgggtcgttctccgatgccagaaaacctgtttgccgagatgcccgcactgaaggccggctttgagagccagggcattgcctgctggcattcggcaggacaagaagccgatgatcttgccgctaccctgaccgccaaggtggccggcgctggccatcaggtgaccattgtctcgaccgataaaggctactgccaactcctagcgccgcaggtgcagatacgcgattatttccagaaacgctggctcgacatgccttttgtccaatccagcttcggggtattaccgactcagcttaccgactactggggactcgcaggtatcagcagcagcaagatccctggcgtgccgggcatcgggcccaaaacagcagtaacgctgctcgcgcagtatcctacgctcgaagcactctatgagaatctgcaagacgtaccggagaaatggcgggagaagttgcgtgaatatcaggagctggcctttgcctgccgccgtgtctctacgctgcaaaaaaatgtggttttaaacgggaatctgcaagatttacggctcaaaaattgaaccgtaaattgagttatgacgtggcaaggcacccataaagtcgcctccccgaacactgacataagtcagtgttcggggagagctaaggcaggcaacgctgctacagcaacaagaacgacgaggatttaatagcgctcgtcgcgacggccaggaaccgctgcccagaacctgcggacgtgaaccgttacctcttcgcggtcgtgatacagctgcttggcaaagatttcaacgttgatgtcgttttcagccaaacggctcttcatgtgtgcaaggatctgcgaaacttcttcgtagcgctttttcatcggcagcttaaggttgaaaatagcctcacgacaccagccgttaaccagccagtcgcccatcagcgccgaaaccttggccggcacttcgaccatatcgcacaccagccagtaaatgttgctgcgcgttggcttatatttgaagccgtcttcgcggtggtgtgtcacctgaccggtcatcatcaaactcggtgccatcgggccgttatcgatagcgtctaccatcatgctgcgctgaaccagctgataggtccaccccccggacatgcacccaaatcgaccgcatacattccgctggccagtcgctcttcccattcgtcggccggaataaagacgtggaacgcctcttccagtttcagcgtagagcgacttggcgcgtcggatgggaacttgagacgtgggatccccatgtagaacggagaattgttgttactgtaggagtaacccacatagcagcagcccggggcgataaagaatacgtgcaccacaggacgctgcgcattctcttttttacctaatacgcgcgcttcacgcattgccgaacgcagcggcacagtcagtttgcggcagaatttggtcagttctttgctttcgttggtgtcagggacctcaacgcgaagctcgccgccgttagtgataacgccctgcaacatacccacaataggtgttacacggtcttcaggcggcaggtctttaagcagctcgccaacaaccagcatctggcgggcaaagataagctcacggaaaggaatttccttcgccagccgatcggcgtcttccagctggtagcactcaaacagcacatagccgctgtcttctttaacgcgggcgaaaccgaagatctctttctcggccgctttggcggtgatttccgccgcgcattctttttcgaagccagaacggcagtagagtgcgagtttattattcatggcgttgtgccttttgtcccagacgcagcgcgccgactaacatcaatatccaaccgatcaggaagaaggttccaccgatcggtgtaacgaagacccagaatttgagtcctgacagcgccaggcagtaaagactgccgctgaataatacggttcccagagccagacaggcgctgctccaataaaaccagaggctgctgcgacgctgcatggcaacgcccagagccaatatcgccagcgtgtgaacactctggtaatttaaaccggtttgaatccacgccatctcggcagagcccagcgattggcttaatacatgtgcgccgaatgcgccaaaggcgacatagaaaaagccgctgatggcggcaaaaatcaacattgcacgactgctcatagctagtgttatcctttagtttcaaattccagaagcgttgatactctggatatcgaaattttttcttttatagaagtcttctatatctgcggttgatcgtagcggaagcgcagcctttcttgttcgctggcagcgcgcgcgaggatccactgacgaaaggcggctattttacccagttctgcctgactgtcatgacaaaccagataaaaagcgtttttactgattaaaacttcattaaacgggcacaccaggcggcccgcctcaatctcagtctgcgccatcacattattcgccagcgccacaccctgaccatgcaccgccgcctgaaccaccattgcactgtggctgaatatcggtccctgctgcacgttaatatgctgcaaacccagctgcttggtatacgcaagccagtcacggcgcgaggcgtcgtgcagtagcgtgtgtttggataagtcttccggcgtcttcaacgcattatcgcccattaatagcgaaggcgcgcaaaccggcaggagatattcggcgtataaacgctcggtgcgcagtcccggccagttacctcgaccgtggaagattgccacgtctacgtcatccgataatttatcttcttctctatcaacggcctgaatacgaacgtcgatccccggataagctgagttaaagccagagagacgcggaaccagccactggatggcaaagctcggcggcaaactgacggtcagcgcgcctttcgcactgcgcgcctgaagcttgcgggttgcctcattcagcgacgagaaaatttctttaatatcgagataataactctgcccttcttcggtcaacaaaagtgatcgattgcgtcggcgaaacagttttaagcccaaaaagtcctcaagtgacttgatctggtggcttactgcggcctgtgtgacgaaaagctcctcggccgccttggtaaaactcaggtgccgcgccgctgcgtcaaacacacgcaatgagttaagtgggggtaaacgtttagacatgaagtggatacttctcattcaggccgcgggccaaagacccgtgcacaattttagttattagtttttttaatccgagacattataaattgtccattgaggatgtacaggcaaaaacctatagttgcgccacttcctgtagccggaacgaaaagttgagtggtatgaggatgccgtgatgcttttggctagtggttgtgatgttgtgtttgtattgtctggcaatccagaccagtagcttaagtgctacaaattttcacttcctgtacattaccctgtctgtccaaagtgattttttagcaccgcattttgcggtgcttttttttgcctgaaggattagttaccttcgaccatctcttttacttctgacttattgatctgctgtttgttaccataggcatccgtgtagctgatcataccggtgtcactgtctgtgcttggtttaccgtttgcaacgatagtgcgtccatcgttagtatgcatcacataattgcttgaacaagcagcaagggtaccggcaagtaaaacagctgaaactacggcgaagatcttcttcataattaactcctgtagattaaaatgcttgaatttcaggataaagatatcgctaaaattcgatagacactccatttcagcataacaagcttctggtatatttccaggtaagcattcctaaaggtgatataagacgcttgtttcattatatgcaggcctttaaccgattaacgtattcgccggtatgaccaggatttttgatgaccaatacgccttttgatttcaccgaatttcgccgccatttccccgcgttaaaccaagacgcggctcagacactgtgctatttagacagtgccgcgactgcgctcacgccgcagacggtgattgacgcgacggtgaattattatcaaaacgcaggggccacggtgcaccgcagccagcataaagcggcacaatctttaacactggcctatgagcaggcacgccagcaggtcgccgattttattcatgctccccgcgtagaggatatcgtctggacacgcggcaccaccgagtcaataaacctggttgcgcaaagctatctacgcccgcgtttacagccgggcgacgagattattgtcagtcaggccgaacatcatgccaacctcgtcccttggctcatgctggcagcacagtgtcaggcaaaggtggtgacactcccgctgaacgccgactttctgcccgacatctctgccctgcccgcattgcttaattcacgcactcgcctgttggctatcggccagatgtctaatgtaaccggtggacagcccgacctcgcgaccgcaattgccctctgtcacgccaacggcacgcccgttatggtcgacggtgcgcagggtgtggtgcatggcgaaacagacgtacaggcactcgacgcagatttttacgctttctcagggcacaaactgtatggcccaacggggattggcgtgctttatggcaaaagtgagcgactggaatcgatgcagccatggcacggcggcggaaaaatgctgacccataccgacatgcagcgctttactccgcaacaggcaccgcatcgcttcgaagccggtacgcctaacatcgcgggcgtgctgggtttggggtcggccgttcaatggttgagcaccctagaccgtatcgccgctgagcgctatagcgcgcagttggcagacaacgcagaaaaagcgctcagcgccgtccccggttttcgcagcttccgtcgcagcggttcatcgctgctggcgtttgatatcgcaggggtacaccacagtgatatcattgccttgctggccgagaaaggcgtggcactgcgcgccggccaacactgcgcccaacctttaaccgaggcgcttggcgtcagcggctccttgcgcgcctcctttgcgccctataatacccagcaggacgttgaacggctggtcgacggcgttcaattcgccctcgagctattggcagactgaattagagagaaattatgttagccccgcccccttttggatacgagattaccgagtcatcgttgattgaaacgttttccggcttccgcctgtgggaagaccgctatcgtcagttggtgatgctggctaaagccctgccgccgctcgacgcagcgttgaaaacgccatcgattgagctttcgggctgtgagaatcgcgtttggctaggctacgaacgactcgaaaacggtgggattcatttttatggcgacagcgaaggcagaatagtaaaaggcttacttgcagttctcctcaccgccgtcgagggaaaaacgccgcaagaaatcttgaaccgagatccgcttgcactttttgagacgctacagctgcgtgaacagttgagcagcagccgtgccagcgggctggctgcgctctcacagggcgtacagaacatcgcccgcgcctgtctttaaaaatgtcttaaacagccgctgcaggacttttaacagcctcagcggctgccattctttctgccttggccatcatcttcttcaacacgtgagatactgcaacaaaaccaaaggttgcggtgaccatcgttgccgcaccaaatccagactcacagtccatccgtttcggcccttcggccgtggtgcgggatgcacagacagaaccgtctgcctgcggatacatcagcggttcgctggaaaacacgcaatcaatccccagcttacccttgttgtttttggtgacgttaaaatcattcttgaggcgctcacgcagcttggccgccagcggatcctgaatagttttagccagatcagctacttcgatacgcgtcgggtcaatttgccccccgcgccgccggtagtgacgaccggaattttatagcggcggcagtatgacaacagcgcagccttcggacgtacgctgtcgatggcatcaatcacatagctaaaatttcgattgagcatctcggcaacgttgtcgggcgtaataaaatcgtcaatgcaggtcaccttacactcaggattaatcgccagaatgcgctgtgccatcacttcaatctttgactgacctacgttttcacgcagcgcatggatctgccgattagtgttggtgacgcaaacgtcgtccatatcaatcagcgtaattgcgccaataccggtacgcgccagtgcctcagcggcccaggatcccacgccgccaatgccaatcacacagacatgtgcagcagaaaacagcgccagagcctggtgaccgtataaacgcgccgtgccgccgaagcgctgttgataagcctcagagtattccgctgccatgttgtgtgacctctcaaatctaagtgctaattaattgtctgcaaaaggattcttggcgtcagctgccggaacaagctgagacccgccgccgagttgcccttcctgatacgaggtcaacattggctgagcgctttgcgaggattttaacacccatacgcgcccatagtgattataaaatcctgccgcaatcgccgcgtttggaccaatcccttgatacatatcgaaatgttgtcccttgattgcaccgcctacgtccagagcaaccatcaggcgaagatgatatttaccggtaaatttgccgttgttgttcagctctggcacctcggcaagcagcgtagtaccagaagggatgagggaacggtcagaggccaccgatgccttggcaaccaaaggaacgcccgccgcaccgcgcactggcgtgaaaggttcaggcctgaagaacacataggaaggattctgttccagtagctcgagcacctcagcctggctgtgtgtgtccgcccagtggcgaatggcctgcatcgacatgtcctgacgcgctacttcgccgcgatcgataaggattttgccgatactgcgatacgcatgaccattcttgccgccgtagccgaagaaggtcagaggacgaccgtcgccgtagtccacgtagccactgccctgcacttccatcatgaagttatccatcagggaattggtgtaagccacggcatagcgactgctgatggcaccggcgtaaattgccgagcgatccggcaggcgaccgccgcgtggttttggcggcatacggtataaaggatactggaactcaccctgcggcgtgtaacgcgcctggactaccggcgtatagtagccagtaaactgcacgttaccgaaattgtctgcgccttccatctgataggcgctaataccgtattggctcagcgtgcgggtgtccgctccagaacgtacccaacgttcgatggcgctataggtattggtatggcggttataaagagaggacgatgcagcctgcacctccagcacctgattcgcgtaatcgcgcgcattcactggcttaccgctggcgtttggctcgttgacatactcaagcgcattgtcgagacgcccgtctttgtactgctggccgcgatcggtcggtcgggatgaacagccagccagcacggcaagcactagcccactcagcaaatatttagtccaacgtcctttcattaatgcgctctcttgctcagggatcaaaattcttaatccagcgcgactgtcgcttttatggcgccggatttctgggaggaaagataacaaagggggaataggaaaggaattacgccgcagaaaaaaatgctttaacggaaaacagcagaaataaccggcattatgaacaaaaagaaagcgataaagcgatttatctcaatcaaatacaaaaagaggttgcatcatttctcacggggagtatagttcgcctccatcggacgcggggtggagcagcctggtagctcgtcgggctcataacccgaaggtcgtcggttcaaatccggcctccgcaaccaatttcgcattgctcaatacgaaattggatgtaagttcgataactacgtgatttaattgcgtaagaagtaaaaagtaagttagtatacggacgcggggtggagcagcctggtagctcgtcgggctcataacccgaaggtcgtcggttcaaatccggcctccgcaaccaactaaccgaatgggtagtaaagaagtaaaaaacagatagcagtagacggacgcggggtggagcagcctggtagctcgtcgggctcataacccgaaggtcgtcggttcaaatccggcctccgcaaccaatcttactgtcacattaaatgtgaatctgttaaaaacaagcaccctacgggtgtttttttttgcccgcgatttatcccctcccccctaaacctccttgtttatcgacgggccaacatgccgccgtttgcaaaataggccttaatcccggccagaatagattccgcaacctgctgctgaaaatggctggtacgtagttttcgctcctcgctgatgttactaatgaaggcggtctcaaccagaatcgatggaatgtcaggcgctttcaataccgcaaaccccgcctgctcgaccttgtgcttatgcagatggttgaccttacccattcgcgtcagcacctctctgccaaatttcagactgtcattgacggtggcagtctgcaccagatcaaataaagtatggtcgagatagcggtcaccgcttttactgacgccaccaattttgtccgattcattctgggagtgggccagaaagcgcgcagcagcgctggtcgcgccttcggttgagagcgcaaacacagatgagcctcgtgccgctcggctggtaaaggcatcagcatgaatggagataaacaagtctgcgcgctgctttcttgccttggcgacacgcacttttaagggaataaagatatcttcgttgcgggtcatgtaaacggtcatgttcggctgttgcctgatgagcttttgcagtcgacgggcaatctgcaacaccacgtctttttctcgcgtcttgtatttgccgatggcaccggagtcttcaccaccgtgaccagggtcgagcataatcacaattgggcgttcgtgtcctgccttgccgtccttctttttttctggcggcaaacttcgcgcaacatcaccacgattgtagtcttcaagcaatgctaacagggatcgtcctgctcgccgccgccctgctcaggatagaggtcaataaccagccgatgacgaaaccccgccacaggcggcagcgtgaacaggtgtggagagatagtttgctttagctcaatcaccagtcgtacagtggttttattaaattgcccgacgcgcagctgagagatataagggtcctgcgcgcgtattttttcacctatccccttaagcacagaattaagctgcacgtcttcaatatcaatcacgacacgcgacggattctgtaacctaaactgtttatatttaagcgactggctggattccagcgtaatgcgggtataggtggtcgagggccagacgcgaacggcaacaacgtgcggactggcggcaaaaccaatccggctaacgcttaacaaccatgatgctgctgcgctttgtaacaggaggcgacggcgagaattatgttgttcgtcaggcatgcagtctcaaagatatcaaataataaataaaagtaacaaaacgcaatagaacaaactttaacgaatcgatccgctgctgtcaccttcaggattgtcaggatttttcagttttttgtgccttagaaataattgaatttcaaaaacagagatttcttacttgccacacagccacaaaagaataaaaatacgaaaattacgaataaaaatgcaaaagaggttttgccgtgaaggaacgaagcactgaattggtccaaggttttcgccactcagttccctacatcaatgctcaccggggtaagactttcgttatcatgctcagtggtgaggccattgaacatgagaatttcacaaatatagtcaacgatatcgggctgttgcatagcctgggtattcggctggttgtggtttatggcgcacgaccacaaatcgacagcaacttgtccgaacatgactatcagccgatctatcacaagaacacccgcgtgaccgacgcccgagcattagagttggttaagcaggctgcgggtcttttgcagctcgatattactgcacgtctgtcgatgagcctgaataacacgccgttacagggtgcgcatatcaatgtggtcagcggtaacttcattattgcgcagcctttgggtgtggacgacggcgtggattattgccacagcggtcgtatccgccgtatcgatgaagaggcgattcaccgccagctcgacagcaacgccatcgtgttgctggggccggttgcggtttccgttaccggtgagagcttcaatctggtgtctgaagaggtcgcgactcagttggcgattaaactaaaggccgagaagatgatcggtttcagcgccgaacagggtgtaagtgacgaagaaggcaacattatctccgagctcttccctaatgaggcgcaggacttcatcgagaaaattgaagataaaggcgaataccagtcagaaactgtgcgcttcctgcgcggtgctgtcaaagcgtgccgcagcggcgtgcgtcgcagtcacctgatcagctatcaggaagacggcgcactggtccaggagttgttctctcgtgacggaatcggtacgcaggtcgtgatggaaagcgccgagcaggtgcgtcgtgcaactatcaacgacatcggtggaatccttgagcttattcgtcctcttgagcaacagggtattctggtccgccgttctcgcgaacagcttgagatggaaattgataaatttaccatcatcgagcgcgataacctgaccatcgcctgtgctgcactgtatccattcctcgacgagaagataggtgagatggcctgcgtcgccgtgcatcctgattatcgaagctcgtcgcgcggcgagatgctgctaaaacgcgttgccagccacgcaagacagatggggcttaatcgcctgttcgtgctgacgacccgcagcatccactggttccaggagcgcggattcaaaccggctgacgtcgacgttttgccgattcaaaagcaggaaatgtacaactaccagcgccgctccaagatcctgatcgccgacctgtaattagccacgtagcggcgtaaaaataaaaaaggcagaatgaggtcactcagtctgcctttttgttttatcgatgccttaacctgtggttaaccgctcgacaagcccgcttcgcctcagcgtcggcgtgcgtattgccaaccctaaaaccttctcactggtgtaaagcgacagccgacgcttggcacgcgtgatagccgtatacaccagttcacgggtcaacaccggcaagaagtgatttggcaagaccagcagcgtatgttcaaactcagacccctgcgacttgtgcaccgtcatcgcataagcggtatcatgcaccggcagtcggctcggctgtaccgatttgatttgtccgtcggggagctggaaatataccctaagctcgcccaattcgttacgcagcgtgatgccgatgtcgccgttaaacagcccgagcgcactgtcattgcggcttatcatcaccggccttccggcgtaccaacgcccacccaacgcggtcgttctgcggataagtctttcacgctgtaaaacctgttcaatgcgttcattaagccctgtcaaaccaaatggtccttcgcgcagcgcacaaagtacctgaaaggtgccgaatgctttgaggatttcggccggatcctcacctgcggccacggcttgtaaataagggcgataacccgccacacaggcatcgagcagcattttaaaatcttctgtctcgttgagagcaaagctgccgacgtccggcaaatcccgcgacagaatgcgacctgcgagctgagcatccccggcgttaaccgcctttgccagaatgccaatgccggaacccgagtcaaatcgataacttttacgcagcaggcaaagcgtatcgcggacgctggccgcatgttccccttcttcgccggttatcgcgcagccggtgagccgttctagctctgcggcgcgtgccgggctgtatccctcctcggcaaaacggcaaatatcaccgagtaccgcacccgcttcaaccgaagcgagctggtcacgatcccccaggaagatgaccctcgcctcggcaggcaatgcggcaatcagacgagccatcataggcaagtcgaccatagacgcttcgtcgaccaccagcacgtcgaggtgcagtgggttgccctgatggtagcgcatcctctggctgttcggctgagcccccagcagacgatgcagcgtcgaggcttcatcggggaactgaacgcgctgctcgtcggtgagattcagcctgcggctcgcctgtcccaacgattcggtaagccttgcagccgctttgcccgtcggagcagccagttgaatacgcagccgcccctcgctattgagctgtaccagcgctgcaaggagtttggccaccgtcgtagttttacccgtccccggtcccccggagataatcgctatacgacgggttgctgcaacggcggcggcaaccttttgccagtcaatttcgcctggggtcgctggaccaaacaactggtcgagaacctcacgtaggcgagcctcgtcaaccgcaatttcaccgttttgctccatcgggttgagcgacgacagaacgccttcgtcaataaagaacgcggcaacctgcccttcgtcctgccacatacgctggagataaagccgttgctgctgcaaaaccaaaggtgtcgctccgctcccgtcgctgaccgcaggatgctgctgtaataaagacaaccactgtgcttcatcaggctcgcccgcgctgagccaaagactgctcgccaacgcagggaaacggccctcaaacaaccggtcaggccgtagctcttcgaggcgaaggcatacgtgcccttttccagcttcggcgctcaggcaggctgcagccagcatcatggccggattatctcccgctatcgttcgagcaaactgtacgtcgagtgcacgcaacgcaccgagtgccatcgcctgttcgtaaagggccaacatcatgaattctcctgcaacaacaacgaggtcaacattggcacctcatcacccttaaacagactgtccatcgcctcaataaacgcctcgtctgggcgttgacggtaaataccgttgtcgggatgagccgaatccactccgcgtaaaaacagatagatgacgcccccgaagtgtttttcatagctgtatcccgctaatcgatgtcccagataacgatgaagagcgagcgtatagagttgatattgcaggtcataacgatgctgcgccatagcgttttccatcgcagaacgggtgtaggcactgctgtcctccccaagccagttggacttgtagtcgagcaggtaatagcgtccctgccagcaataaaccaaatctataaagccttttaacatgccacgaacttgctgaaaatttaaaggagggcactgcgcagacaagggatcgtagtgacgaaccagagcatcaagctgctcagacttgagcaatccgtcgatcggcagataaaattgtaattcagactgctgctgagaaggttccagctcggcaagcgccatgccgctctcgtctaatggcgcggtcagcacattatttacccactcttcaagcaccggcagccattcgccagcataaccttgagcttcgagctgctccagcagccactgtgggtctaccggctggctaaagtctatctcctcgaacaggctatggaggaaagtccccggtgcagcaccgcgtgggaagctgtgcggtgtcatctgcggcgcaatatcctcgggttgctcaccggctgcgtcaacgtcaagttttggcagcaagtcctgagcaagtgatgagccatgctgctgcaaaccggaatagctagtcacacgccaaaagtcggcaagactacggcttatctgtgctgccgaaagctcaggagtcgccacttcaggcgcgacccacagggtttgctccactgtagcagcctgtgcaacagccacgttttcatcggccagagcctgtagagactcggcaagataactcgcatcaccagcctgtccgccctgaaccaggtacccaagagcgccgaggtgcagatcggtatcgccctgttttttacgcgtcccctgaatgagcggcgcaataccgagactacagtgataaacagaacgcgtgagcgcaacgtagaggaggcgtaggtcctcagccaagcgttcttcctcggccagttcaaggcttttctcgtcctcactgagatcgagcagcgccgcgaagctctcacggtcgtgataaagcccctgctgctgaaggcgaaaattactgataaacggtagccaaaccagcggatactcaagtcctttcgacttgtggatagtcacaactttgaccagatgcctgtcgctctcaagccttagctgctgactctgggactgagtgtctggctgggcaatctgttgtgcaagccagcgaaccaacgcatgctcactgtcgagctgtgcggcggcctcctgaagaagctcgccaagatgcagcaagtcggtgactcgccgttctccccagggtttgccagcagatcctcagccaggtgtcggtgggagataagatttttaagcatcggcaatacgccacgctgcatccaacgttgacgatagccgtcaaactcgtccaccagtttgtcccacgccagttcgtcctggctgagtgcgtcgagcgtcagggcatcaagccccatcaggccggttgccattgcgcttcgcagcgttctttcatgttccggcgtcaacactgcctgcaacaaccaaagcacgtccatcgcttctggggtatcaaagacactgtcgcgattcgaaagataaaccgagggaatattcagtgcactcaacgcgtcacggattagtgcggcctcacgacggctacggattaaaatcgtaatgtccgatgcctgaactgcccggcgcgtttgacccgaaaccagccatgcctgctgttcctggccagcagttagccagtcacgaatctgtgaggcacagtaatgtgccataaactgctggtagtcactcacgccaacgccttccccgggctgaagccagcactgcaatcccggctgtttaacgccgtgcagctcaaagctcagctcgttatttttaggcgcaggctgcaccgaaataaagggtatttgcgcaaacagaaacggcgtcggcagccgtgagaaaatcttgttcacgccgttgaccatcggcaccgacgaacgccaattggtgtccatggtgtaatgagcactcacttcggaacgcgcacgcatataggtgaaaatatcggcaccacgaaaagcataaatcgcctgtttagggtcgccgattagcaacaggccacaggccggttgtttaccataaagacgatgaaaaatacgatactgctgtgggtcggtatcctgaaactcatcgatcatggccaacggatagcgctggcggatagcctgggccagcgcctctccaccaggttggcgcagcgcattatcaagccggctaagcaggtcatcaaaccccaactcggcacgctgacgtttttcttcggcaatcgactggcggattgccgtcaatgcgcgagcaatcaccagatctcgaatacttaatggttcttcatacagccgatcgatggcactaaacaccctatgttcgggtggctcacctttcttggttttctcaagcagcaccgactggcggaaacgttcaagctccttcggtaggctgtagctttccgttggctgagaagaccagtcgccaatggcagcaagccagttgggaagatagcggctgctgtagctccgtttatcgatacccgactgagttatcagactttcaaaatctgccgcagcggcaagccactgcagcttgatgtcgtcgatacgcgaaacaatacgttgatgtcggtcttcgagcgtttcctgctggtcgggcgggaaacgcagctgcggcgcttcgccgtgaagataagaggacaagtctccaagcaaggcttcaggcccactccactcttgcgaaaccacacgggcaatatcgagcggcaacgggtagcaatatcgccgccaaaagtcggcacaggcctgacggcgcagcggcagttcgtcctgaattaacgtttgctcaaaaagaatgcccgactcaaacgcgttgtgcatcagcatgcgctggcaaaagccgtgaatggtatagatggccgcttcgtccatttgacgctcagcggccaacagcgtcgaggccgcctccgacaggtcaacaatttcagtcattagcgccgtaagcatcgggttagcgctattacctctgatacaggccagccgcagctcgtggatattgctgcgaatacgaccacgcagttcctctgtggccgcctcggtaaaagtgaccaccagaatctcttctaccgtcagcctgcgggaaaatgcggcctccttgccaaggccaagcagcaggcgcaggtaaagaagcgccagtgtaaaagtttttccggtgcccgcagaagcctcaatcaaacgctcgcccgacagcggcagagtgagagggttgagtttgtgcgggattgtttctgtcattatttattaacctgatgtggaaaggttttctgcaaacttgaggtcgtcgagtaagttttccaacctgacggtgcagcatactcatgaaccttgctgtcattgcccgaaacctgagaaagcatagtaaacccggtttggctgatgacagcctgatgatagaaatctgccagctgtttctgcgtcagcccctgaatcaccgcaataaccttggctcgggtcgtaaacttgtcgttaccgcggctaaagtcttcgctaaaacgcccgacctcttcagtcatggtctgtgggttctgcaacatctcgttcagcagcccctgcttatactgattaaattcggcgtctttcatatcgcgcagacgtttttcaacctgagggtagaaggcaagataacgctcatagagatatttgggttgcttgctgttgctctgcagcaggaagcttatccccactgcttgccgaccggcattgggaaggcgaacaccgcataaccgagctgttcctgcgtgcgaagctggctgtagaaccaaggctgaattatctgccccagcagcgcgctatatcccatactgcgaacctcgtcgtagcctacggggacataaaccgcagctaaagcagagtccgtcgaggtaccaacgcgctgcatattaaccttcttgggacgatcgataataatccggcttccgcgccagaactgcgtaccacgaggcttaaccttggcctcaatattgttgaccattttttcaacctgaggagccgtcatattcccaccaccaacacttcgagcgccgcatcatccagcaggcttttacggtagtcgactacctcttttaacgtgatacttttcaccagcttttcacgtacctcacgttcgctgtacggcaggcgtgaaatcaactgaataggctgtagggccaattcaaacgccttacccttgtctgcggaagcgagccgttcgagataccaggacttggcctgctcaagctgctccggtgtgggcacgaccttaggatactcctctaccagctcgcttaataaatcagggagatgattggtaaagccattcgcattgagctccagaccattgtccggggaggtcgcaaaaccgatacccccaatcgaagcctgatagctcagctggtcgaaggccacgccggtcagataatcattcaggccatagagcacttgtttttttgccgtgttcagtgactgttcgctacgaaatgccagcgtgatgtcggcctttggctcaccggagaagtcgtggcttggcatataaagaacgtgtagccccttcttattcacgataagagcaggcttgacaggcgcattgcttttgttgaccagatcgagattttcaggaatataggggtttagcatcggcaaggacaaactgacctggccctccaactgctgccactgggtaaattctgcggcggggaccttatccacctcgtaaggtgcatcaacaaaataggccattttattatggggttcattcgggctgataatccagaaacgggctttctctggagtaagggagtccagtcgactatcaatggccttaggatcaaactggtcggcaagataaggtgaatccagaacatgatcgacgggcactcgcaccattgtatctaccagccattcgacgtaatccatatcacgtgtcaccgctggataacggaaatccaaagccagcacgtgtgcaatttcatcgaaatactcttttttaacgccctgtgagcgaatcagcgacagatagttaaaaatggctgcaatcaccctatccttctccgccagccccttgtcagtgagagacaccgaaatggcgaagatcccttgattacgctgtaccatcgggtcggcaccggcgttgattccgtctgcaagcccttctttctgcagccagtctgacagcgtattcttgctacggttaccaatcaggtaactgatataggtgtccgtcttactgcgaaatgcagcactgttattatcgatagcaaattcgatgcgcagttgcttgcgcggctccgcaggcacgtaatgaatgataatgccctgctgagccggagtgacgcttggcacggttattggcgggacaacagcattgtggttggcaatctttccgaacgtatcggaggcgatttgcgccagctcgggtaaggacttattgctgtaaatcacgccgaccatcagattcgcggaataataacggtggtaaaaattgaccagcgcatcatgcaaactgttgcccggtttatcttttaaggtatcaaggttcccacctgcatagcgcgacccaggatgcgccggattcagcgtttcagcacgaacctgtcccatacgcatgccgtcacgcgaacgcgccatcgtaagctcggcattgaccgcattacgttctttgtcggcatagcttgcgtcaagtaaaggttcaccaacggcatcagcgaggcgatcgaccgcctctttcagagcatcattttcaacctcaagataaaaagcggtgcggtaagaggcggtactgccgttgtggctgccaccgtgcatcttgagaaactcggagaggctttcaggtttaggatatttttttgaacccatcagcagcatatgttcagtaaaatgcgccaaccccagttgcccatcgggatcctgtaaggacccaaccgacacggccagcgcagccagtgacttgctggcattggcgtcggaaacaagtagtaccgtcataccattggacaatttaatggcctgatactggcgaggatcgttttgactcttatgtattgtttctgcaatgggttgccagtctgtcgcggaccagactacgggggcccaaaacgtcaacaacaacagtaacccgcttacacgggtaagctgttttaacattacctgtctcccttgatagaaaagataactcaggctatagagtcgaaaatgaccgaacctctaaccaaaagcgtgctaaataactcagacctcacaggcaacagatagttttttatctcggcacctaggccagattatgttgaaccacaggtaaaagaaagcgctctgcctcagcaatgatggcttcgacgttttctggatcaagctgacgcatgactctttgtacataagggtcttgcccctcaccgggcacgcgcccatcgccttgccaggcttgtgcaagtttagtgagccctttgctctgcttttcaggatcatcgcttattgttccactttgcttgtcaaagcagacgtccagccatgcccagccgctttttccaaggagttttaacggcgagttcagcccctgtttataaccctctatcaaggtttgtagctgcatcatcgcctcctcgcggttcaggttggcgtaatggaaagccgtgccgctgcggccaaacatccggctttcgcccgtacctccattggcgcagtaaacgacgtgctcaatccacagtagaagaccgtcgcgtgcaagcaatgcggctggacgccagcgaagaaggccgtcactttgtacctgatgcatccagcccgttaactggatatcgccaatcggaagcgaaagctccaggctgccgctttctgttcgtgcttccctgacctgttcggcaagttcggtcatgtcctcacactgcctgttccagaaaatctcgccaaaagcaccgtaaggcagccccccgaggctttaatgcgattgaacaacacgctagcatcctgttcttcaataagcgcatttagcagctgagtattcagctgatagcggttgagattatccagaataaagggctcttcgtctgataactcggtctcctccacgacaaagctgacgttgagccgcatttggaaaaaggccttgatcgggtggcgataaaagcgcagcaggttatcaagcgttatctcgtgtagtggcaggtcgcttagaggctgggtaaagtccgtcagcggcttcccctgacctcccgctgccggcaaccattctgctgcatagctccttgcttcactggtgctatcaaagttgctggcgtcaaagggcgtacgtgaatgccagtgttcgagatactgacgcacccgcttttcgctttcgtcagcgttaagactaagatcttgctccaggcagtagctttgcccaatgtattcaagcagctcgctaaccaacaccgacggatatctttcactgttgtcctgaattgaacgaccgatataactgatgtacagcttgtcctgtgccgaaagcagtgcctcaaggaacaggtagcggtcatcgtctcgacggctacggtcccccttttcatctgctttgccatcaggtcaaaccctagcggcggcaacgttcgaggatagatgccgtcattcattcccagcagacaaaccactttaaacggaattgaacgcataggcatcagggtacagaagttgataggtccggccagaaagcgttggctgatcctctcttgatccaaacgcgatgccagttcgtcgcgcaagatagagagcggaacatcatcgggataacgcgccgccagtccctgattaaggaccttttgccactgctgctcgataagcgccagagcaatctccgtctccccttccggggagaaaaaggtgctcagaagttcatgacatatcggtaaccagtcctccagcgtacgagactgggcaagacgaatacgccattggctgagttgcatcagtaactcagccagatgccctgccaactctgcggcaagcccggtcgattcgtcatagggcaatactccctgccagtcaccggctcgactgtccatcgcatagccaagcagcatacgtgttaagccgaaatgccaagtgtgttggcctgtggccggaagcgccaactcgcgaacgttatcgtcgtcaagcccccaacgaatacccgattcgcccacccattggcgcagcagcctcaatccttcttcatcaatagagaaacgcgtcgccagcgcagggacctcgagcaatgccagaacctgctctgaggtaaaacggctttgcggcaaatcgagtaaggaaacaaaggcctgcaaggctgggtgtgactggcttgccttgcggtctgagatagcgaatggcaaatagcgttctctcggtgcattgccgaacacggcttgaatatagggtgcgtagctgtctatgtcggcgaccatgacgataatatctctaggtgtaagatgtttgtcggcctccatcattgccagcagattgtcatgtaacacctcaacttcgcgctgaggactgtggcagatatgcacactcagcgagtcgtcccccacctgcagccgtcttttgctttcgctactgttcagcgtttcgggcgtcatgccgataacggcgcggtcttctaggtctaacatatcttgctgaatagcatgcaacagcgtttcgtcccctacgtcgacaaaggcatgtacttcctgaatctcatcgacctgtgacagcaaatacatatggtcgcggcccagcttgccccatgaagccagcagtggattactgaggttttgctcaccctcttcattaaacaactgttgggcctgcgagggatctctgaagagtgatgtttcaccggactcaagataatgtcgacgccgacggctctgtaaacgagcgaggaaggcataattttgaatatctccccaatagtaacggcaagggttggtaaacattagatggatatcgatatgtctacccagcgcctgcagcgcctgtaaatagaccggggcagcgccgaaattccgcaaatgaaaaccctttttggcaagccaggtgggcaaacatccgccttgttcaaggccgcaataaaacgctcataaagattggccctatgccattcgggttgctctagctcttcggtgtactcgcaaagagcccgccacagatgagcctgccacagctgcgaggggtcaagttcttcatcaactaaacggccttgttgccaggttttcagccattcagggcgataaactagatactggtcaaaaaggtctgcgacccgcgcggccaactgatgaatttttcttttatcgcgatcgtcggtcaaataattttgcagcggtgcaaattccggctcagagagtttgcctggtaatagccacatcagtttccaggtcatcgcatctttgctgaacgcactttccttggggattccgggtagaacctgggtaaacatgtcccaaataaaagtcgccggcagtgggaaagcaatattggccgcaataccaaaagactgagcgagttccatttgcagccactgtgccattcctgggctttggaccagtatgacttcctgctcaaaaggattgtccaaaggacgcccctcaatcagtcgggttgtcagtatttttaaaagatccaactgattggaatggtagacggtgaacatatcggtttccttgaggtccacggacgacaactgcattaattcatactttaccgagcgactccctaatgcaaagcaagcagggaaacatctgttaatttcgagcggctaatcaacaatgggtctgcaaatcatgcgacttaaccgactggtatagtgcaacggggtttctacacgtgccgtaacccattggcaatctgtagaggtttgaatgcgggtaatttgcgcactccatcccggtttatccagtgctttacccacgtttagcaccgcgaagctttcaagctgttcatgggcctctgtccaggcctgtcttacttgccactgtcttgagaatccttgagtaagggattgataataattcagtaatcccaggacagaaaccgacagcagcaaggttgcgagcatcgtttcaggcagactgagacctgcctgtgggtggagcctttgattatgggtcatcacatttcctctcatcctttaaagggcaaaagtccagccagccgttttgtatcggtataacccggctttcagtggcatcaactgtcttgagggtcaccagttggtaaagcaagaccggcacagagtcaggctgaatttttccttcaccccgcagtaaatacagctcatcacgttcagcatttcttatgcagctacgcagagtggcgcttatctctccaggaagactgccgttttcggtcactgattgcgcacactgccacccttcgacaggttgtaagacccagcgcctgttaagcccccaatttaatgaggagacggcaagctcccaagactgaagaaaacttttttcgctgcgagtgagtgccagtgcagcattaagatgctgattcaccatatttaaccccattaggccaaatgccatcatcatcatgatagccagtatcagtgcgctgccttgctgcgagtggtgtgcttcaggctcaggcttgttcattgcacttttacccacgtatcaaggcgggtactaatcgccggattctttttccagtttgccgccatattcaaaataatgagcgggtcccctccttcaccaagcgtagttgcaacctgaaactgactaaaactcacctctgatgggtcaagcatgcgctcccatccaatcgcgttgcagccattaacgccacgctgactttccagcatgccgctgcgtagccgaaaaccaaaatactctgactcagcatgtcccaccggctcccatcgaccgttgcgattgagatcataggcgacgacaatgcaggagtttttagcctccccgctggcttgacctataactatcgacttaccgttacaggttccggcgcaaaaaccgctacgcctaaagtccttttgcaaagttcgggcagtctgccgcagaagttgatcgagctggtaatgttggcttagctgctgtgtgcgttgcctcagcatcggcaaaaactgcatcgccccataatgagcatgctgccgatacctattgccaacatcacctcaggcagtgtgaaacccttttcgtttaacatttcggaaagccagacatgggtttcccaaagctgcacaatctgaggcgccccgagcagataaaacgaccctcagggtacccgcagcattactcacattgatgtgcccgccctgagccatattacgtagcccatagaaacccattattttctctgaataggcacgcacactaatgttcggcgccgttgtttgaaaataacggtcctcagccaccagacagctggcgggccgtttacccgctcccacacatcctgaaaggccatcaatgacccacagcaattgggtctgattatgggaataggcaatcgactgaagtcccgtaagataaagccgcagtctttgcgcctgctgctcgagctgtagctgctgctgatactcgcgccagccgtgcaaagaccagaggctcatcgaggcaaccagtgccagaactatcatgacttcaatcagggtcattccctgctctccttccgcgagtcgtattttcatgcggcgagtgtaaggaaatatcggcagcagaaaaggcgcattgccattaccatcggcgtctattccaaacaaagttcttttttgcacaaggttgcaaacgcattggaatagcggttccaccaaacacattcgggcagataaaagcgttggtaaacgcaataaagagagtaaaaaagcagagaggaaaagctgaaggcaggataaaaaaacgcccgactaacagccgagcgctttatgcacttagggactaaacagaaggtttagacagcaaccggcgctttaatagcaggatgcggatcataaccttcgatttcaaagtcttcaaaattatagtcaaacagagaggctggcttacgtttgatgattaatttaggcagtgcacgaggttcacggctcagctgcagatgagtctgttccatgtggttgctgtacaggtgggtatccccccggtccagacaaaatcgccgacttcaagatcgcactgctgcgccatcatatgtaccaacaaagcgtagctagcgatgttaaacggcaagccgaggaacacgtcgcatgaacgttgatacagttggcaagagagcttgccgtctgccacatagaactggaagaaagcgtggcaaggtgccaacgccatctggtcgagctcaccaacgttccaggccgaaacaataatgcgtctggaattagggtcctgcttgagctggttaaccacgttggcaagctggtcgatctgcttgccgtccggtgtaccccatgcacgccattgtttgccgtaaaccggacccagtgaaccgtcttcatcggcccactcgtcccagatggtgacattgttgtcacgcagataggcaatattggtatcacctttcaggaaccacagcagttcgtgaatgatagaacgcaaatggcagcgcttggtggtgaccagcggaaaaccttcttgcaaattgaaacgcatctgatgaccaaaaatcgacaatgtacccgtgccggtacggtcgcctttaggcgtgccttcatcaagcactcgctgcattaattccagatactgtttcatattacctcaagacaattgtttctgcgggcgacggtaggcccagacgaccataatgataccaaatacgatcatgggtatggagagaatttgccccatgctgatgaaaccgtcgaacaaaccgagctgagcgtccggctggcggaagtgttcaacgatgatacggaatgcaccgtagaaaatcaggaacaggcccgagacactgcccattgggcgcggtttgcgaataaataggttgaggatgataaacagcaccacgccttcaagcaacagttcatagatttgtgaaggatgacgaggcagaacaccgtattggttcagcagcggctgccatttgggatcggcggcggcaatcgcaacgtcttcatcgtgtgagccagggaaaagcattgcccaaggcacatcggtagtgacacgaccccagagttcaccgttgataaagttgcccagacgtcctgcacccagaccaaacggaatcagcggagcaatgaagtcggaaacctggaagaacgtgcgcttggtgcgacgtgcaaaccacagcatgacgataataacccgatcagaccgccgtggaatgacataccgccgtcccagactttgaagagatacaatgggttatcgaggaacaaaggcaagttatagaacaggacgtagcctacgcggccgccgacaaagacgcctagaaagcctgcatacagcaagttttcgacttcttcttttttccatccgctgccaggtttgtttgcgcgacgaacggcaagccacatggcaaagacaaaacctaccagatacatcaagccgtaccagtgaagtgaaatcggtccgagagagaaaatgaccggatcaaacttgggaaacgccagatagctgttactcatctatcaccacaaattgaaaagttgttgtgggcctgaaagtgagttcaatcaatgcgatagctaaagcagttgaggttacagcaaggcagcagagaagcgattcccgaaagctcactcgggcaaatgaccgaggtaaacatgcatagccaacacagctgcagcttcaagtacgattggtatcaagatgaacgacttaaggccagaggggcaaatcatagcataagagaggggaagtctggttcaacgccgggggaaaagatctgtaaaaaaaagtctcgtcatgctgcaacttaataaaaaaacgagacttttttgcggcgaaaagcgtctatttaaccgttatttaccgccgcggataagaccgccaagccctcgacgttccataaacgccgatgtcatatggcgaacctcgctggtgaactgtgcctgcataacacgctccgccaactcttgtgcatcggagatatcaattttgcgtagcaggtattttacgcgggcgacgctgcgcccgttcatgctgatgttacgatagcccataccgacaagcagcaaagccccatcgggtcaccggccatctcaccgcacaggctgagttcaatgcctgcactggcagcgtctcgtgctatctggctgagcacgcgcagcatggctggatgaaggctgtcataaagaccagcaacgcggtgttattgcggtcgacggccaacaggtactgcgtcaggtcattagtgccgacagagataaaatcaacgcgtccagcgagcagaggcaacatgaagatcatcgaaggaacttcgatcatgatgccgatacgcggcttaggctgtgcatagcctagcgcttcctctacctcacggcctgcacggtcaataaggcgacgcgcctcatcaatctcttcgaggctggttatcatcggcagcaagatacccagattgcccgtagcagcgtttgcacgcagcatggccctgacctgtatcaggaaaatctcaggctgatcgagggtgatgcggataccgcgccaacccaggcaagggttctcctcgctgataggcatataaggcagctgcttatctgaaccaatgtccagcgtacgcagcgtcacaggcttagccgggaaaagctgtagcatgccctgatattgcgcaacctgctcttcttcagaagggaagccgctttgcagcataaagggaatttcagtgcgatacaggccgatgccgtcaacccggccaccaaacagtttttcgtggtcagcgctaaggcccgcgttgagcatgactaagacctgctcgccgctttgcattttggctggctgctcaacttcgctttcagccttttcgctcagctccatttcttcgctgataaggcggcggtattcggttacgagaaccggctcagggtcgataagcagttcgccgcgataaccgtcaacgatgagctgtcgctgatttaaaagggaaggctgaatatcggcgcccataaccgtcggcacgcccatggcacgcacaagaatggccgcatgcgagttggcggcaccgtctcgcacaacaacacccttcagacgttcctgtgggacttccgccaacaaggttgccgtcagctcatcggcgacaagaataaagttttcgggccactgtgtgtcgccctgtgcggtatcgtcgagatggaagaccagacgctgtccgagcgctcgcagatcgctgccgcgctcgcgaagataggtatcctgtaggctggcaaactgggcagcaaacttctcgaccacctttttgacggcccactcagccacggcaccttggtcgatttcggcgaagagctcgcgcttgagccttgcgtcgtttaacaggtgcgaatagagatcgaaaatcgccgcactttctttctgtgcactggcggtgaagcgtttactgaaacgtcggaactcggccccgcgtcttccagagctcgggtgagacgctcacgctcgcgaacaggatcgagcgttgaagccatataaacgttatcgagtgacggctgattactgtcctgccaaccggtaccaatcgccacgcccggcgaggctggcagcgccttaacgcgagtctgtcgaaatcgcccgtagagaacgttaagctgcgcctgagaaagaattgcggccatttgcgtggccagggtgaccatgaaagactcttcactttcatcaaactggcggtgctcacgctgctgaataaccagcacgcccagcagttggcgtcggtggataaccggtacacccaggaaagaacggaataagtcctctttaacctgaggaatatatttaaaactcggatggctctgcgcatcggcaaggttgatgggttctgccaggcggcctaccagcccgacaccctcatcaaaagcaagagcaatagtgcgcccgcgaggctttttcaagcctcgcgtcgccataaggtagtaacaacggcgatcgttatcagcgagataaattgaacacacttcggtgtccatcgccagacaggtttcattaaccaaaacatccagcgcatcattcaggctggacgccatcgctaccttttcaactatttctcgcaaccgcgtgagcatttattcgtgacttagcctcttttccgacgataagcaggggttgtacggttaacgggtacttcctgcattggcatcacagttgtggaaaactctttcattacccgacgataaacgtcacgtttaaatgaaacaacctgacgaaccggataccaaaaactcacccagcgccacccatcaaattcaggcgtactgctgcgttgcatattgatgtctgcatcattacacatgagttgtaacaggaaccatttttgcttttggccgatacagaccggctttgtgtcccaacgcaccaaacgttttggcaatttatagcgtaaccagttgcgagtcgaagccagaatacggacgtcttttctacttagtcccacttcttcaaacagttcacgatacatggcctgctcagccgtttctccggggttgattcccccttgtggaaactgccaggagtgctgcccataacgacgggcccataatacttgcccctgcttgtcacagattacgataccaacattcgggcggtagccatcatcatcgatcaccggactacctcaataagcttaaaatgcatagatactctgattgtttcatactaccaacaggcggtaaaccactggttataactctgttcaaaagggggttgacgggataacttacccaaaatatcgaagttataaacagcctttgtcatttttcagcaattttattcactttttctgtggatagatatgtgaagaacataagagtaagacgggtaaaactaattttgacctcagtatttggctgataaaatttaaaataaagttcatataaaacatgacaatattgtgatatccactgggtttcacctacgcttacccccagcataaatgagcagagatcctaaagtggcgaaagatcgcacaatgttgattttatccacagagttttgtcagtttcaggttatatatgggacaaaaccttataaaaccccctcgtcaagcctgtaaatcgaaacagtgctactcataactgtgggttatcccacaaatctgtggataaccaggtggaagatcctgttcattgtgcccgtcaacaggtgatcaactcgttaagttggggataataatcgggcaagtggcagaaaaaacccacgtcaaatcatgctattattcaggttaatcacagctcgcagatttaattttttctgcgcgcaaacgtgagtacattttttaatcagacgagagcgagacttttttatgtcgatccctttgcccgccctgacaccgcctgaggatgaacaagcgctgttagcgcgtgccgagtcactggccgggtacacgctgggcgaactggcagaacgggcaaatcttgctattccacccgatttgaaacgcgagaaaggctgggttggcatgcttcttgaggtttatcttggtgccagcgccgggagtaaaccggagcaggattttcccgaaatcggcatagaacttaaaacaatccctatcgacgcaatgggcaaacctttagaaaccacctttgtgtgtgttgcgcccctgacaggcaacagcggcgtcacctgggagagcagccatgtgcgacacaagcttgcccgagttctgtggatacccgttgaaggagagcgccaaattccgctttcagtacgccgtatcggtagcccgctgctgtggagtccatccgatgaggaggacgaacagctacgtcaggattgggaagaattaatggatcttatcgttctgggaaaagtcgagagcattaccgcccgccacggcgaggtattacagctcaggccaaaggcggccaacaataaggcaaggaccgaggcaatcggagaaaagggtcaacctatcatgacattgcctcgcggtttctatttaaagaaaagctttacgcggcagctactcgccagacatttcctattatagggttattcctggttgccaaaatggctattacagttggctagcgcttattatttgctaatcttaataggaaggtcttttcagaccaaatcaaagggtttatcaatgaaaacttcatttaagctcgtcagcgcatttgctctggcgtttgccttggcgggttgttctagcgactacgtaatggcaacaaaagacggaagcatgatattgaccagcagcaagcctgaacttgataagagtacaggattgctgagctatgaagacgcgcaaggtaatgaaaggcaaatcaataatgatcaggtgacagaggtcatgaaacgctgatatcaacgcgtttgagtttgccgcatcaaaatattaataccggctattccaattgccggtattttccttgagcgttaatcatcaactttcaccacattgaactttcaccacattgtgcgcaaatttatggcccatttgtgagacagtaaataacattcccctgcctaagctttatgaaccctctactgcacgtagcaaaacgagcgctttccccctttgctcttcccctccggcgtcgcttgtatatagtcaatcttacgtggctgcttcgctaagcgcttttttggctataaaaaggcatcgtccgtatgggtgctgcccgactccaaaacattcaagcgccagccagacattatctgacactaaggaagacaggcaatgcaatatcaccgtataccccatagttctttagaagtgagcgtactgggattgggcaccatgacctttggtgaacaaaacagtgaagccgaggctcaccagcagcttgattatgccctcgcggccgggatcaacctgattgataccgccgagatgtaccctgtgcctccacgtccagaaacccagggtctgaccgaaagctatatcggcagctggataaaagcccgcggcaaccgtgagaagattattctggcgagtaaggttgccggtccatcacgcggtaacgatgcgtcgattcgcccaggacaagtgctggatcgcaagaacatccgcgcagcactcgacgccagtttgaagcgtcttaataccgactacctcgacctatatcaacttcactggccgcagcgcccgaccaatttcttcggcaaactgggttatacctacagtccggataactcaccggtcacgctgctcgaaacgctggaagcgctaaacgaacaggttcgtgccggtaagattcgctacatcggcgtatcgaatgagaccccttggggcgtgatgcgctatctgcagctggctgaaaaacacgacctgccacgcatcgtctctattcaaaacccttacagcctgctgaaccgcagctttgaggtgggattagccgagataagtcagcatgaaggcgttgagcttctggcttactcgagcctggcgtttggtacgctaagcggtaaatatttgaatggagcaaaaccagcgggagcgcgtaatacgctgttcagccgctttacgcgctactcctctgctcagtcagaggcggcggtggcagagtacgtgggtctggcgaaaaaactgaatctggatccttcacagatggcgctggcgtttgttcgtcaacagccgtttgtggccagcaccctgctgggcgcaacgacgctggaacagttgaagattaatatcgacagtcaggacctgaccctggacgaggaagtgattaatgcgctggaagagattcataagcgcttcactattcccgctccatagacgcgtttggttgcaaaaaagggcgcctggcgcccttttttacctctagattttgcgtttttgcttaatctgccacagccagagtccggcaatcgccagcgcaaacaccaccccgaagccaacgcctattgccaatactggcgcaccgagcatcactaccagcgaatagagccccaacatcagcagcatggcggtgttttcacccaaattctgcaccgcaatcgcgttacctgtgccaaccgtttctttgccaagatgctgcaacaacgcattcaacggcacgacaaagaagccgcccagaacaccgataagcgccagaagaagataagcgttcaacatgctgtgttgcagcgtgaacagcacgaccacgacaccgatcccgatcccgcaggcaggcaacgtttaaccgttttcaacgtaatgagcttcgccgcggcaccagcaccgagcacgatgcccaccgcaaccatcgcgttaagcagcgtcggcgtggtgttgtcgctgatacccaatgccaccggcacccagagaaccagcaggaaacgcagcgtcacgcccgcgccccaaaacaggctggtacccaccagcgagaaacgcgtatccgcattgccccacaaaatacggcaggcatggaaaaatgtcgaagacatgcgacgagggttccacgactggcccggccttgccgccgtcattttcggaatgaagacgttggccgcaacggccgccgcataggcaagtccgcaaatcatcaaggcggcggtgatgtgccagtcggctaaggctccaccggcgacagaacccaacaggatagccgcgatggttgaagactccatcaggccattggctttcaccagcttgtcaccggaggtaatttcgccaaggatgccgtacttggccggtgaataggccgctgcgccaaccccaccagcccgtagcccaggaacgggttgaacccgaagcagataaccagcgcacccagcagtttaaggccgttggcaaacatcatcacacgacctttggcaaagctgtcggcaaactgcccgacgaagggcgccagaataatataggccgccacaaacgccatttgcagcactggctggctccattcgggatagagctcctgtttaatcaatgccagcgtggcaaacagcagcgcattatcgccaaaggccgataagaactgcgcaacaatcacggccgtcatcccgcgtgacatcaggggaaatcggctccccagggcttactcatttttgctctccggttgttctgccatctcgcgcagggtcacaaaatcaggttttccgctgcccaacagcggcagcgctttcaccacgcgaatgtcacgcggcacagcaatctcggggatccccagctcgcgggcgcttttagatagcctgtcgcgcgatagcgtttcgtctgtggtaaacagcactaacgcctcacctttggcgctgtctgtgcgcgacgtggcagcgtgctgggcgtcgggagaggcctgaatcgcaatctgctcgacgctctctagcgacaccatttcgccggccagcttggcaaagcgtttgactcgaccacgaatcgcgcaatagccctcggcgtccagcgtgacgatatcgccggtgtcgtaccagcccgcctcaatctcaccctgcgcattctctgccgcaggcagttcgagtacgcccggattctcgacgcgtaaataccctttcatgatattaggcccgcgcagctgaaggcgtccgcccttgtcgatccccggaaccgccagcaggcgagattccatgccgggcagaatcttgcccacggtattgacccgtgccgccatcggtacgttaatggccaccaccggtgcgcactcggtcacgccgtagccttcaagaatgcgcaggccaaatttgttctgccacacctctttggtgccctcggaaagcttttcagcaccggcaaccacatagcgcacacgagcgaaatcatagggatgcgcaaagcgggcgtagttacccaagaaggtcgacgtaccaaacaacacggtgcagttttggtcatacaccagctcgggcacaattcggtaatgcaacgggcttggatagagaaacacgcgcgcgccggtcatcagcggcgtaaacagcccgacggtgagaccaaaggcgtgaaacagcggcagcgccgacataaagcggtcacgtggagtgaagtcggctacggtacggatttgctctacgttggctatcaggctggcatgcgaatgtaccacgcccttgggattgccttcagaacctgaagtaaaaagcaccagcgccgcatcgtcgggttgttgatagagcatcgcgcgctgcgggaaaatcaaatggaacaggatccacagtttgtcttctttggtgaccgtatccttgaggtcttcaaggtatacccatttcacctcggtcacttgctcaggcagatgggtcagcttgcccttttccaaaaactgccttgaggtcacgatggtctcaatctgtgccgccttgacggcacttttgattcccttagcgccagaggtgtagttgagcagcgcggggatacgatttcgcatcgatgcaccaaaaatggcggccgccgtgatggtggcattgggcagcagcataccgacgtgctccccctcacgggtgaagcgttgcagaatacggctgacgccgagcgatttcttcagcaaccctgataggtgtcttcgttgaacgaaatgtcggcgatgcacggcttgcggcgaccatagcgggtctgcgccgagagtagcgcctggtagagcgtttccggcggacgcgtcgccatacgcgcttccatcatgatggcatgcagccgttgcccggccagcaggcgtctttctcgcgcacgcggtgcatcaggcatcaagacgttctgcggcggtagaatgttgatggatattttcgggaaccagcgcagtttgaagctgccgaacaggcgactaaaaatcgagaactcagcgccgtcgatccgaatagggataactgtcgcctgcgatttagcggccacaaaggcggcaccgtcgtatattttcatcagcgagccggtcaccgtaatgcgcccttcaggaaataccacgaccggacgtcccttctcgatttcacgcaccagacgtttgattgccatcggtttggtgggatccagcggcacaaagtcgatgtaatccttaagccactgcatataccaacgttcggtaatcgtggagtaaacggcaaagaccggtttaatcggcaggaacaggaccagcagcatcgcgtcgataaacgagacatgattggggtcagtagcattcttggataggtcaactgagctttatccggcgttacggtaacgcgaaatatgaccttaaacagggcgcgaaaaaatgaatgtaacaaccgatagagcattccgttctcctctaaatttgcacctatccgaatgagaacaggtaattttcgaggttatcataacggagctttacttgacgacaggtaaggaactctcagaaaaaaatcagggcgtaatctcaggcaaaaaaaaacctacgcatctgcgtaggttggtgcaattttaatcggtttcaacatgcaaagcatgttggatgattcaccaatcaatacctctgggaccaccaacattagagaacatcagcgcgttgcactacctttcaatcgcaagagttctgcgcaaactgcaaccaactgtaaaattgacacaacgaatgtaaggcagaggtttttaagatgtgataactaagttaaatcctaaactacagacgaaaaaaaacctacgcatccgcgtaggtcggtgcaaattcaatcggtaccaacacacaatgtatgtcgatgattcaccaatcaatacctctgggactgctaatgtagccgctgggaccttacggccaccagcgggcaatcgcaacattagtccgcaaagtgtaaccagcggtgagaatcaaatagccgatacttctaccaggcagctcatggcgttcggaccctgcgtcagacgtgatgtcccgatgtccagcgtcagtacgtttgggttacccgcctgctcggtttcgtgccattttttgccaaatcccggattgaaccaggcaccggtcgccatcagtactacgctgcgcgtaatgccgtcattgagcgacacgcctgccagacagctgccgcgctcgttgctgacttttacaacgtcaccgtctttaagattgcgcgttgcggcgtcctcagggtgcataaacaatgtttctttgccggaggtcttgttgttttgcgcaagcggcgtctggtcaagctgactgtgcaggcggtccttgggctgaattgaaatcaggtgcagcggccagcgtttggcggtctcagatcccagccattcgaccggcggctgccactctgggtggggcgcaaagtcctcatattggtagtcggcgattttctggctgaacagctcaatcttgccgctctgcgtacccagcggattagcacggggacgcttacggaacgactcaaagaacacataatctttttcaggcttgggtaattcaacaaagccgcgttcccagaacgtctcgaaatccggccattcgatctcagttccctgttgcgcctgcccacactgcttataaatctggcgcagccacgcgtcttcatcacgcccctgggtataggcttcccggtaccccagacgctcggccagatcggcaaaaatatcgtagtcgttacgggcctgatgctgcggcgcaaccgcctgatgcatcgccagcacaaagcgatcgcgcgatgaaccgccgatgtcgttacgttcaagtgaggtcgtggcaggtaatacgatgtcagccatacttgccgccgaagtccagacgttgtcctgcacgatcaccgtatccggcttctgccagccctcaaccagccggttaagctgttgatgatggtggaaaggattaccgcccgcccagtgcaccagatgaatatcaggataggtcagcgtttcgccctgaaactcgtaagactcgcccggattaagcaacatatcgctaatacgcgccacaggaatggacaggccagacggattcggaccggtactcaccgccgggcccggcgtatcgaaacgcggattaccgacgctgttcatcgagccgtgcccaaacgagaatcctcccccggcaggcccacctgccccagcatcgccgaaagcgcaatcatcatccagtaaggctgttcgccgcggtgggcacgctgtaccgagtaagaacaggtaataaagctgcgcttgccgatcagctgcgtagccagacgtacaatgcgttcagccggaacgccggtgatggcgctggcccagtcggggttttctctacgccatctttgctgccgttaagataggctgccaactgcggataaccgacgcagtgcgtggcaagaaacgcgtgatcctccgcttctctacgttgaatttcataggccacggccatcatcagcgcggcatcggtatttggccggatcgggatccattccgcattgacgaattcagggcaatcgtcacgcatcggactgatattgacgatcggcgtgccttttttggcaagctgctctagcgcgggcttcaaggtatgctccactgcaccgcccgaggccacctgcgcgtttttcagcgccaggccgccgaaagccagcagaatatcgcaatgttccaccacgctgggccacgtcgtcacgcggccggtcagtggcgtgtaggtaccaatcacgtaaggcaggaagaactgcgcggatccccagctgtagttccctgctgatccacccgcctccgccggtgaaatagaagcggcgcaccaatgagcgagcgtggtgtaaacgcccggcagaagaccagccgtaagaaccgttgaaaatgcccgcagcaccgtagcggtcgcgcacgcggcggttctcttccgcaaccagatccaaggctagctcccagtcaacctccacgaagtcctcacgaccgcgcagtgttcggtcgctgttttctcttttttgcagccaggagcgacgtatagccggcttgcgaatgcgtttgtcggaatagagcagcgcgggaatggaatcaagcatcggtgagggatcggcatccgcagaataaggttcacagcggataaggcggccgttttcaaccacagccgtataagcccccagtgggcaagctgaggatagcgttttatagacatgattctctctgtgcagatgttttcaaaagaaataaggcagtcgcgctcaaacgcccatcacacgcgggcttgagcgagtattattgctaacaaaatagcaatcctgctcctcggactcaaagcacaattgaagataagagcgtgtaattaagtgatttatcgctgaaagcggggtgcaggaacttaaaaggcttaatttatcgatttacggcgagtattattcgccgtctcaatgcgcttgcttgcgaagttgcgatctacgtcccttgcagagaccgggtttttccgcaaaactgaaccatgtaaacgtttactcctcaatacgttggataggcaaaatggctacgattaaggatgtcgcacgactggcgggtgtttctgtagcaacagtttcacgcgtgattaaccactcccctaaagccagcgagagctcgcgtgatgccgtgatgagcgcgatgcagcatttgcagtatcatcccaacgccaatgcccgcgcactcgcgcagcaatctactgaaacattgggccttatcgtgtccgatgtatccgaccccttcttcggggcgatggttaaagccgtcgaacaggtggcctactccaccggcaactttttgctgattggtaacggttaccataacgttgataaagaacgacaggctatcgagcaactgatccgtcaccgctgcgccgcactggtggtacatgccaagatgcttgcggaagacgagctgtcggcgctgatgaagcagatccccggcatggtgcttatcaaccgcacgctgcccgaatttgaacaccgctgtgtggcgctcgacgaccgctatggcgcctggctggcaacccgccatcttattcaggccgggcatcagcgtatcgccatcctctgctccaaccatgatatttccgatgcacgcgaccgtttacagggctatctcgatgcgcttgaagagcacgggatcccggtcgatgagcggctgattgtctcggctgaaccggacgaagtgggcggcgagcaggcgattaccgaactgctggggcacggcaaaaacttcaccgccgtgacatgctataacgatccgatggcggccggagcgctctcggtgctgagcgataacgggattgatgtcccaggcgagatttcgttgattggctttgatgacgtgctgatttcgcgctacctgcgcccgaggctgaccaccattcgttatccggtcgtggcgatggcgaatcaggccgcacagctcgctctggcattggccaagggactaccgctgcctgaaaccaccaatatgtttagcccgacgctggtgcgccgtcactcggtgagcgtgcctaacagttaacgcgcaggggcgatatgttggtgatagaggcgcacggatttattcggataatcaagcgcattaccgatatagtcccagccgaaacgctcgtagtatcccgagaaagttgaccatagatacagctgttcaaatcccgcggaacggctgtactcggccacaaaatgctgcaatttttggcctagcccgcgcgaacgccaaccttcatcgacatacaaggccgccagccacggcgagagatcctgacggcttatcaaatcgcagcgccacagccccaccgtgccaaccagttggtcgccatccagcgcgataaaggtcagcggcaaatctgcaccgcgcaggctgctgtcaaccacgctggcaaaaaattccggcgtattatcagcatcaaaggcctgccacaaccagtctatgacctgctcgcgatgctgcggataaaggtgcaaattaacgacggtgaccatcggctataccaacttgccttgaaaaataggcaccgactcaaacagatagccgtcaaactccggggcatcgacgtccgacagctccatcaaggtatttttaacgttttccatgtgctgccacattgcctgataggagcccatgacgtcgcggcgtcgcagtgcggcaagaatgttttgatgatcggcaagccacttgagacgataaccccgcgtggcaatatggctgtgcagctgtttccacaacgggcttgaatcccggtgcgcccagatattcttcaccgaatcgagcagcatctgattctgcgttgccccggctatcaacaggtgaaacaacctgtcgttgtcgccgctttcgtcgttggcgacgatggcaatttgctcctgctccagcgtacgacgcagattttcgatgtcggatttcgtcgccatcttggcagcaaaggcagcgatgttactttcaagcaattgacgcgcctgcaaaatttcaaaaggcccaatctgtccctgatacagcgaatcgtcttgcccctcttcctctcgcggaatacgcaccacgtaaacgcccgacccctgacgaatatcaacgatgccttcaagctcaagcatcagcagcgcttcacgcacgatagtgcggctcacgccataggtttccgccatattccgttcaggaggcatccggctgccaacggcaaaatgtccctgtttaatcttttcgcgcaggtcatgacctatttcctgatattgctttctttcctgcgaaaccacggccttatccactttctcaccttaccagcggcagaaaccgcaaaatgtgccccgtgatgggccgcctctcgccgagtgacggccctctttgtggcctagtctaccaaacccagcgcctgatcgagtacctttgcaccatttaaggtgccgtaggccacagaatcaattacagcgatagggatctggtagtggtcggtaagctttttattttctgccagtttaaagcgcacctgcggtccgagcagcaccgcagtgacgtcctgtgcgtaagcctcaagctcatcacgcaggttctgctccgcaatagcatagattttgtattcaagcccgcgtgcggccgcttctttttccattctggtgaccactagcgaggtcgacattcccgctgagcaggctaaaacgatacgtttcatcagtaatctccgggttatttgtcttcatcatccagggttaacgacagcctgcgctcagcggcaagtgcgctgaaccagtgcgaggatttcttgcggcggcgctgacggtcatggtccaaatcaatctctatcagcccgtagcgattcttgaaggcattcatcggcgagacattgtcggtaaacgcccaaagcatatagccgaggcagtttgcgccctcttcacgtgccttaagcgcccagtaaatatgttcgccgataaactcgatacggtaatcgtcctgtatctcgccggtttcctgactgcgaaaacgcccttcatcctcaatcccatgccgttttcggaaataaaccacggcgtattgccgtattcggtcttcatccgcatcgccatgtcataaacaatttttggataaatttcccagccgcgagacttattcatgcgccttccgggcagttcaaagtgctcatagtaataagctggatggaaaggcgtttctttattccattcccgactgggtgctttcactcggtgcgggtaataaagattaataccgacctcatcaacggtattgtcacgaataatcgccagctcctgttcggaataggcgaagtgaatctggtgtttggccagtaagtcgagcagttcgcggggtattcgcccttgattaacgggtctaaaaatacgcggttgtagaaaaggtcataaaggtgcgccgcctgacggtcatgtgctgccgatgaacgcggatacgtcacctctgggttaagaatgacgccaatcgtgccgtgagcgtcatagcctcttttacgaaacagcgaaaccactttggcggttgccagcaccttgtgatgattccactgcatccatttgctggtgttctgctcatagggccagcgaatcgcgtcaaggtagacgcgggtttgcaccaccaccggttcattgaaggtgaaccatcgcgccaccttgtcggcaaagcgttcgaaggctttttcggcataaagcacgaacagttcaaccaccttcttagagctccatccatcatatttttcaatcagataggcaggtagctcgtagtgctcaagacacagcatcggttcgataccttcgcgcttcatctcatccaacagattgtcgagatagcgggcgtactcctcatcgacgatgccgttttcatagtcggtgaaaaaccgcgcccagttgatagaggtgcgataatgcgtgaggccgctggccttcatcagcgccacgtcttccttgtatcgattataaaagtcggtggccttcgccggaccataaccgttgtgccagacgtggcgatcgtttttgtaccacaggtcaaggtaggagtcctgaccggtttttttgccactccagccctccgtctgccacgccgacgcggctgcgccaaggataaaatcttcaggaatgttgatcgaaactttactcatgacttatctccattttaaagtcagaccggtcgctgtacggcagcggattgattttgcaaagcctctttctgggcctgctcggcgcggcgcgaggccacttttacaaacgggaagtacacggcggtagcaatcacgatgcatatcagctgcgtcaccacggcccccattgagcccgccgttgaaagccaggcgttaattaccggtggtgtggtccaaggcaccatcacgacggcgcgcccggcgaagcccagactggtcgcgaaataccccacggtgccggtaataagcggggtgataatgaaaggaatcgcaagaatgggattgagcatcaccggcatcccgaagataactggctcattgatattgaagaagcttgggcccagtgaaagcttgccaatctctttcatttctttgcggcgcgtggccatcagcaccgccagcagaaggccaatggtacagcccgatcccccgatgctcatgtaaacgtcccagaaaggcatggtgataatatttggcacttctttgccctgctcaaacgccgtcatattgaccatgatggccccgagcagcagcggctcacggataggcttgatcatctgattgccgtgaatgccgataacccagaacagctgcgccacaaacatcagcagcaggatccccggcaggctttgcatcaccgactccagcgggtgctgaataacctgatagacggcgtcgtagaggtaaatcccggtcagacgatggaaaacgaaaccgaaggtagcgatgagcaccacggtaataatggcaggaatcagcgccgagaaagaggcggaaacgttaggcggtacactttccggcattttaattcgcagccggtcaaaggattcaagcctggaataaacctcgacggaaagaatggcaataaacattccgaggaacagacttttggtatccgagaactgtttcgccagaacgtctttcacctcttgcatatggccgttgaccatcatgtcgagagtcgttggcgtcacggagataaagcagatcacggccagtaggcccggaaacagcgagcgcgatccattaatcttacccagctcgataccaatcaaaaataccgcgccgatagtcagaaagctcagcgtggcgtagttaatgctggtcatgatcggcttgagcgtggcgagaaaggcaaagctttcgaaatgcgcgaggccgtttttcggatccatcaccatattggaaataagcactgaaaatgcgccgacgataatgaccggcatcagtgtgataaacgacgctttaatcgccataatatatctcaggctattaaaggtattcgcgaagccccgagggaatcaataaaccggtctttgtaggacatggcattacctctgcgtattgttgtaagcacagcaagtgttgtaggcacagaaagtggttttttatcgctatttggtatgccaaaaaataccttagtctggcttattttctgtgatcgcattctcagaagcgaatattggaattccaatatgatgaattacgccaattttggtatgccaatatggatttcactatgagctttgaccttgagcaaacggtaatggagctgttaatcaatgcgggtgaagcccgctcgtgcgcaatgatggcgattcaaagcgcccgtcagcaggactggcaggaggcggcacaacagcttgaagcctcacagctggcggcgcgcgaggcgcataaggtgcagacccagctgattggagtagacgaaggatcgggcaagatccccatgacgcttattatggtgcacgctcaggatcatctgatgacggcgatgctttgccgcgaccttgccgaagaaattgtgctattaagaaaggagatgttcggccaaacggcgaaagttggcgattaaggggcgtaaaaaagccgcgacatgttggatgccgcggctgacgttaacgtgacgcgtgaagcaatcagatattctcgagcgccagcagctcttcaatagtctgacgacgacgaatcaaacgcggcacgccgttttcaaacagcacttcggctatcagcggacggctgttgtagtttgaagacatcgacgcgccgtaggctccggtgtcgtggaataccaggtaatcgttgatatctgcctctggcagaacccgcgtttccacaccgccgcccgcctgctgggtgaatacgtcgccggactcacacagcggcccggcgataacagattcgcgctgcggctgctcgctcaggtcgcgaccgtcggctggcagcacggagatatggtgatagctgccgtacatcgacgggcgcatcaaatcactgaagcctgcatccaccaacacgtaatgacggctgcccatcgatttaacagcgcggatctgcgcgaccagcacgccagactcggccaccaggaaacggcccggttcgatttcgaggctgacagggtgtcccagatgcgcggcaatctgctcacgcgcgcggttccacagaccgtagtagtggtcggtatcgatagattcgccgccaaactggtaaggaatcgacaacccgcccccggccgagatggcttcaatgtcgtggcccaactcaatcacctgacgaaccatggtgtcgcaaacctgctcaaggtgttgataatcaacgccagacccgatatgcatatgaatacccaccagtttaagctggtaggcacgaattttctccagcgccagcggcaggtcaccaaaccagataccgtgcttgctgttctcgccgccagtattggttttttggctgtgcccgtgaccgaagcccgggttaacgcgcagccaaaccggatggcccggcttctgctggccaatctgctccaacatatcgatagaaccggcattcaccggaatagacagctcggtcactctcgcaagcgttgccgggtccagcacgtcagcggtaaatacgatttcactgtgttcgcccggctggtatcccggtttaaaaccggccaccagcgcacgctcgatttcaccgagtgatacggagtccacttttacgccctgctcgcgcatcagacgcagaatatggatattagagctggccttttgcgcaaaacgaataacgtcgaactggcgaagttggctgatacgctgctcaataacctgcgcatcatagatccacactgggcttccaaacgctttgacggcgcttagcagattcgcgctattgagcgcattttcattattattcagtgcaaaaggcattaggttctccgttaagccgaacgctgcaatagcggcctgctcgttgtctgaggatttatcaattatccggcattatgccgtcctatttttcggggttaaaatatctatttagcggcagtctattcatttatgatatgggacaatacagcccaggagtgacccaccatgcccgccatctcattacgtcatatcgaaatttttcatgcagtaatgaccacgggaaaccttaccgaagcggcggcgctgttgcagacctctcagccaacggtgagccgtgagctggctcgctgtgaaaagctattaaaattgcagctgtttgaacgtcttcgcgggcgactttatcctactgcgcaggggctgcggctgtttgaagaggtgcaacgatcctattacggcctcgatagaattattaacgctgcggcgggcattcgccagttcgagcaggcgcagctgtcggtggtatgtttgccggtgtttagccagtcgctgttgcccgccgtatgccagccgtttttggaacaatatcccgaagccagcttcaacatcgtgccgcaggagtcaccgctgttggaagagtggctgtcggcgcagcgccacgatttaggcattaccgagaaccccacacgccggccggcacacagcgccaaacgctgctgacgcttaatgaggtctgcgtgctgccggtcagtcatccgctggcggccaagccggtcatcactgcgcaggacttcagcggactcaactttatcagcctgtcggccaccgacaactatcgccagctgctcgacgcgctgttcgcggaacaaggtgttcaacgacgcatggtgatggaaacgcacagcgcagcgtcggtgtgcagcatggtggcgcaagggatcggcgtgtcgattgttaatccgcttaccgcgctggaatatgcccgaccgccgcatcaaggcgcaggtcgcatcgtcgcccgcccgttcagcgagcaagtccccttcaccgtcagcctgattcgcccgctgcatcgcccggcctcggcgctggtggatacctttatcgagcactgccaccggcaggctgcgttattaccgcagcgtctcgccgccgcgctccgccactgactcagcgcaaaagttgcacgtcctgctttatccagcgtgggttagcggcaaaccactccaccagaaaatcaagcagcgcccgcagcgcgaccggcatctgcctgcgggtcgaatagatagcgaaaatccccatcgactgtggctgccattcgggtagaaggcgaaccagctgtccgctggcaatcagtgccgccgcggaatagaccggctgcatcacaatcccaacgccttctaccgcgccggtcagcagcaccaatgattcgttagcgctcagattaccgctcaccggtacgctggattttttaccgtcgcgctcaaaactccacaggcttttaccgaaataggtgtaggtcaggcagttatgcaacgccagatcgtcaggtttgcgcggcgtgccgtgggtcgccaaataggccggtgaagcgcaaaccaccgagtcacagtgcgacagtggacgcgcaatcagattcggatcgagatcattggtaatgcgcagcgccaaatcgatacggtcctccaccagattcaccgcccggctttcaagttgcaggtcgatatttaactgcggatggcgacgtaaaaactcggcgaccgcgatcaccaccgctccttgtccaaacgactgcgaacagctcaggcgcagcaacccccgcagcgcttcgtcacccgactcggccacactttccatctccaccgagagttgcaacagcttgcggcaacgcaacagcgtgccctcaccggcgtcggtcaggctaagcttacgcgtggtgcgatgcagcaggcgagcgcccgaccacttctccatctccgaaagatagcgggtcaccatcgcacgcgacatattcaacgcttcagcggcgttgatcatcgatccgcgctcgacgatagccacaaaaacctgtgcagccatgattctgtccatgtgttattcgtccgatttatgcaacaaacagttgcgtagtatccggtttttctcgcgatccgtgcaacttataatctttatcgatagccacacataataaacctctgaggaaacatcatgcgtttactgacactcaccctgaccgctgccgtcctgcttggcggcaatttgaccgcgcgtgccgccgagccttctgctccgctgacgcttgacgtttacaacccgggagcacacagcctgtttgccgtttcatctgaaataatcagcggaaaaaatgaccttatgctgatcgatgcacagtttcagcgtaatgacgcacaaaagctggtcgataaaatcaaggcaaccggcaagaagctgaccaccatttatatcagccaatccgatccagacttttacttcgggctgagcatcctgcatgcggcgtttcccgaggcaaaaatcgtcgcgacgcaggcgacggttgacgagataaaggccaataaagacgggaaattagcgttttgggggccaaaattaggcgaaaatgcacccagcagcgtcatcgtgcctgaagtactgaagggcgacaggctttcactcgaagggcatgagctggagatcaaaggcgtgatgccggagaagactttcgtctggatcccgtcgttaaaagcggtggtgggcggcgtgctggtggacggtaacaatatgcacgtttgggttgccgacagccagaccaaggaactgcgtcagaaatggctcacctcgctggatcagattgctgcgctgcacccgaaaatcgtcataccggggcatttcctgcctggcgcaccgcaaaatattgcgtcggtaaacttcactcgccagtatttgcagacgcttgaggccgaactgccaaaagcgaaagactccgcacagctcatcgccgctatgaaaacacattacccgcagctgaaagaggaaggatcgctggagctgacggccaaggtgctgaaaggcgagatgaaatggccaaactagacaatagcttttgattgcaaaccgggcttaagttcggggtcaatttgctcatagaggacttggccttaagccctcgttggcgggtctggggccgtggcccctaatcctctactttcataaatttccccgacgccatcacgttgtcgccaaatccacagtctccgacgctttttaacgtcaggttctgtcctgcgaaatccagattaacggtgcagtcggtgccagcggcactggcgtcatctaccgagtgataaaccgcctgattgttttttatcgcggtgaccgttgagaaattaccggtgttcggcccgtagtagagcgacatcgccccatgtacatgccgctgaattgaatcacgtactgactttcctcaggcttcacctcgaccgtattccaacttccctctccggcatattgccagtacagccctgccggggcgtttgacggcggattggcgtcaaggttgctctgaattttctcaagattaaactgcgtttttgcgtcctgcggtgccaaacttaaccaggctttggccttgccatactgcttctgatgcatgtaggttaaagcaatattattataggccgttgccgttgaactcgcgggtaagtggcagaactcgctccaggcgacctgatcgcggaacagattttgcgccttggcgtaatcaccctgctggtaagcgactttgcctgaagacgcataaagcccggtcttgaggcagtcggccttaatgtctggttcatcaatttttgcccaaacgttggagcaaataaaccagcctgctaacaagcacgcaggcaaccaaaatttcatcgatctcccctttgtatcgctgacaaattcactgtggcaaaggtatagaactgcggtggacgaaaaacatccttacaagtcgggcattgccctctcgcacactgtcactcattctgggatgattaggaaccaccacttattactattttatatggctatttatgactaaaaaacctgggaaaacggcacggtggcgtgcagtctggcagttgattaagccctattggcggtccgaagagaagtggaaagcctggagcatgttggccgcaatcatcattctttcgctggggtctgtctaccttagcgtgcagtttaatgaatggaatcgcgtgttttacgatgcgctgcagaataaaaattttccggtcttcaagcaacagctgtttaagtttacctggctggcgctgattttcatcgtggtcagtatctacaaggtgtatctgacgcagggcctgcagatgaactggcggcgttggatgaccaacgagtatatggataaatggttaaccaatcacgcctactattacaccgagcatcaacatcaggttgataaccccgatcagcgtattgcctcggacctgagcgctctcacctcgggtacgctttcgctttcgctcggcctgctttccagtctggtgaccctgttctcgttcgtcaccattctgtggtcggtcagtggaccgatcagctttatgctagggtcgcacgctattaccatccccggctacatgctgtggtttgccctgctctacgcgctggtgggatcggtaattatcggctttataggccgcccattggtcaagctgagctttaaccaggaatggttcgaagcaaacttccgttttggtctgattcgcatccgagaaaacagcgacgctatcgcgctgtaccacggtgagaaaagcgagaagaagcagctggccgacaacttcgaggccatccgctccaactggtggtcatcgatgcgcaccacccgacgcctcaacttcgccagttcgttctacggccagtttgccattatcttccctattctggtggccgcaccgcgctacttctccggcgccattcagatgggcctgctgatgcagatttcctcggcgtttgggcaggtgcaggactcactgtcgtggtttatcaacgctttcaacgacctagcgagctggaaagcctgcgttaaccgtcttgctggcttcaatgccgctatcgatcaggtcaacacccagcctcgcaatattctgctaggcgatgccaaagacgacgatttgcagttaaacaacctgacggtgaccttgccaaacggcaatccgctgttctcctctgtttctgcctctctggcgacgggggcgcgcgtgctggttgcgggcccatcaggctgcggtaaatcgacgctgctacgtgcaattgccggcgtatggccttacggtacgggagaaatcaacactgccgccaacaagaagcagctattcttgcctcagcgcagctacattccgattggatcactgcgtgaagccctcacctatccggaagaaagcagcctggaatatactgacgagcgactctgcgaggtgcttgagtggtgtaatctgagctatttgcagccggtgctggatcactattccaactggagccagcgcctctcgccgggtgagcaacagcgtctggcctttgcccgcgcgatgcttatcaaaccggaaattctctatctggatgaagcaaccagtgcgctggacgacgagacggagcagcgcatgtacagcctattgctggaaaaactgccgcagacgactgtgcttagcgtggcgcaccgcaacagcgtggcgaaataccacgagcagtgctggcgcttccagctacaggacgacggccaatgcagcctaatgcgttccagactgcatgaagacacgctgcctgcctaaacaggtatcagcctcagccccgcgcagtagtccgcgccgggggcgttttaccccgcaatgccacctgatgttagtccgctagccgcttcccctttcggtcaccgccgatgtgcatttattgagcgccaggccacagaatgcgttacccgttttgttcaaattgtatagctcaccatacaattaacgaacgattcaggagggctgatgaacattgataaaaattcgctcataccgttttacctacagatagaacagcatcttactgaaaaactcaacgctaacgagattaagccaggcgaccccattccaaccgaggcggccctgtgtgaaatctatggcgtttccaggatgacggcgcgcaaggcggtcgattatctcgtcaggcaaggtcgcgtcgtgcgctttcgtggccgtggcactttcgtcatcaatccagacagcaagcaaaaaacagtcctgcctctggaccgtcactttactgccagcgatattgccaaagagcttaatcagaccctcgagaaccggatactggaatttcgtaaaatgcctgcggggcggatattgccgcacagctcaatatcagtgctgaaacgctggtctattttatgattcggctccgtctgcttgatgccagacctttcgtctatgagaaaggctggatgctgtatgagccttttccctgtctgacgcgtgaagcgctgaaacattcaaaatatgactatctgcgtaacaaaggctttcagcccgccggtagccacaaacagatatcggccgagttaccggccaatgagattcggcaggcgctggagctgtcgcgcgacgagcccattttacacgctcgctccgtcgcctattttgctgatgcgaccccttttgaggtcgccgatatttattataatcaacgttattatagttttagcatacgggcgcaatcctgacgggataattgaatcccctgttaagcaatgaaactgtcatccccgattaaagatatccctgaaatgttggcttttggtggtgatctgtttcgacttgtaataatcgttgaggcgctcggcgtgcagttcagaaatatcggatacgccggagtccgagtcgtcagaactgtcgtcgacgataatcgtgttagtcccttctcgttcggcccagcgaggtaagggttgtgcgataactgacgctatcgggctgactggcgattttagcggttcctccactgacagtggcttgccgtcatacttaccgacgttatctaatgaattataaaaattaaccagacttgccattctgccagtccctaaacggctctcggaggcattcgatagaggctcggtttccagcgttttcagcgcaaagaccttatgattgcgcgtggcctttttacgcgtcaccatcatctcgcgatcgttagccttcgccacggccacgtcactcggtgattttccgatatcactaaatcgcgtcagcgtagtgccatttggaaaaattttatccgtaaacaggctgggcctgtttggcgtcaggagttgatcaggatgagcattccgtgccttagtctcctcgatctttttcagtattctaacggtcgagtcttttaatttaccgatgcactcttgaacaataactatcgaggcggagatatcagacttttttttaaacttgttcatcgagttttcaatttctgcataaatttcgtcaaagctttgatgagacttttgctctaatttttttaccgctgaattacttaacaaggtacgatcgctgccctgattgcttgcaccgaggatgttaaccgaagccgttttctttagttctggctcggccttttcgaagatagtgtatagcgtctgattataattactgagaatgcgaggatatttcataatacatcccttaaaatttaggcgagcagatattagcaacaacctgaaataattctaacctagatttcagggtatgataatcaacgaaaggtgaaaatatgccgaggggaatcttgaattacttgcccgcttgcgcattatctttcatggctgccgtcacgggctgagagagatcagaaaaaattttcacccgttcagcgacatggcccctttttagaataattgaccgttggccgtcattttcaccagactctgcggccttacggctatcaagcctggcgttaaacattgtttcgtcgtaaattttgaagcgaggcatcggctgtcggtgcacaatgctctcctcaagctgacgaggcgtaaagacgggtttggtccagttgactttattatcctcagaaagcgaccgcctatacgctataccgaaaatccccatcatcagcacaggcctcaaggtatttaccgacagcttctctgcatcagttccctgagttcggacagcgggattgaggttttgaaacttttcgcgcagctgctggaaaaccttttcattatcatgaaatattggtaagaaattattttgcaaggtcttaatatttgacgaaatacacttactggaatgagttaaattactaattattaatccacaatttttactgatgttttttctcggcgtgcactccttgataatgttgcgtatcgcaacactaattcctctggcttgcataatacgtcctttatatttccattgagtttcccaatattactccgactaccactgcctaaaaacaaaaaaaaccgctcaagctaatttatgagcggtttatattaaacttaattaacgaaacaattaactcgcgagctcgatcttcacatcattggcaattttttcgacctgtggaccataaataacgtgcacgtcgttttgcgtcacgcgcttaacgcccatcgcgccagtggtcattagcgttttatccaccacctgcgacatatctttgactttcactcttagtcgcgtaaagcagcaatcgacgctgtcgatgttgccttccccgccgaggcccttgatgatgttagtggttttctcgctgccggtctgcgcggtagcggtggaaggcaccgatgacgatggcatatcctcactttcatcctcacggcccggcgtcttgacctgcatgcgggtaatgacccaacggaacgagaagtaataaagcggcgcgtagaaaagtcccagaataagcggataccaccagtgggtttttgtgccaccgaggatgccgaaaatcacccagtcgatcgccccaccctgcacattaccgatcatcacttgcagcagttgcatcagcacaaaagaaatcccggtcaacactgcgtgcagcaaataaagcaccggtgagacgaagataaagcaaaactccagcggctcggtgataccggtagtgaaagaggccaacgccccgccaacatcagggctttgacgcgcgccttatgctcaggcttggcgcattggtacatggcaagcgcggcggcgggcaaaccaaacatcatcaccgggattttaccctgcgccaggaagcgtgttgcctgacgtgtcacttcatcgctaacggcccccgggtgagacagggaggcattaaaaatattcagcgcgccgaccacgctttgattatcgacggtggcgacgccgccaagcggagtgaagcgaaccgtttcattgataatatgatgcagaccggttggaataagcagacgctccgaggtggcatagataaaggtccccacctcgcccgtgcggccaatcagctcaccgacccactgaatcccaagagcaatagatggccataccagcgacaccagcacaccgaccaccggcaaaacgacaatggtcacgatcggcacaaaacgccttccgccgaaaaaggccaccgcggtgggcaatacgatggtgtagaaacggttgtgcaggaacatagtgataagcccgaccagcaccccaccgagcacgctcatgttgtaggtgaagatgccgagcatgttggtgaattcagacgcatagataagcgcctggctgttgggcataccctgtgcggtaaggtatgcgacgcgggtcgtttcaggggtaatattttgcgctaacaggctgtagttaatgccgacgtgcatgccgatgaaaccgatcactgcggaaaaggcggcggtcgccttctctgcattggcgagtcccatcgcggtggcgacggcaaaaaacaccggcaggtttgcaaacagcgcactggaaacctgtcgaatgaagccgatgaccagttgtagcatcctgacatgggtgaaggtatctcccgtcacgttcgggttctgtaatgccgaagccagcccaagaaagatacccgccgcagcaataacggagataggcgtcattagcgccttgcctaaatcatgaattttgcttcccagatttatcatctgcttttccctcaatggcagagctcaaaaaacactcaaccttgagtaaaggcggataatgtatagctgtatagacaaagcgttcaggactatgaataagatcacagtttgttaacaaatcgaaatgaggctacaatgtagctctagtgttatcaggattatgacaatgagattttgttcgaaattgggacgaaaaaaagcccacatcggacagtgggcgttgggttgcgatataccgggtttaaaccctcggctgcaacaatgcaaatgtgagaactgctcgctctcgcctgctacgttaacggcattcatctgatatccgcagagatttagagtaaagtcactgttaaaaagtatgtctcactttgatcaagatcatacttttttgaatatgtgcaaattttttaaaacagaatttccttccgtgaagtaccacccaagcagtttacaatgttactactagccaactattagtttttaaacccaaaaagacgcctttgtacacaaaagtcactgatgcgtttgacttttatagtcatgaatttttgaaacatttagcaatatctaacaaccaaatgcttacagagtgaatgggtctcctctcgtatagtgggggacttattgagaatgattgttctcaaccccctaagagagtgaattctatgcgcctgaaggttctttctgtcagtactgtgctactgctttccgcttgtgacgggtcaagttcggccccgcaagccgctgctccagctcctgctgttgaatatgtcaccctacaatcaaaacccgttaccttgacaaccagtctgcctggtagaaccgatgcagtgaaaaccgccgaagttcgccctcaggtcagcggcgtcatcctgaagcgtacctttgttgaaggtagcgaagtcaaagccggtcaacagctttatcagattgaccctgcaacttatcaggccgcatatgataaagcgcttgcgacttataaaagcgctgctgcgacctcatcccgctacaaaggtctggtctcttccaacgccgtcagccgtcaggtttatgacgatgctgtcgccgccaccggcgaagccgctgccgatctcgagaccgcacgcgttaacctgcaatacaccaaggtttatgcgccaattaccggtcacatcggtcgttcttcggttaccgaaggtgcactggtaaccagcggtcagacgaccgatctggcgacaatcagccagttgaacccaatctttgttgacgtgagcgaatcttctatcaatttgcttaacctgcgtcgcgccctcgcggaaggcaaactggcgtcagccggtgctaacgcggccaaagttcagctgactcttgaagacggtagccaatacagcttgccaggtaaactggaattctccgaagtcaccgtggacgaaggaacaggttccgttacgctgcgtgcgtcattccctaacccggatgatgtcctgctgccgggaatgtttgttcacgcaacgctgagtcaggcggttgaccagaacggtattctggcgcctcaggaagctattatgcacaacaacaaaggcaagccttacgtctacattgttaacgcaaataacaccgttgaagagcgtgacatcaccacaggtccaatgatgtctggtaactggttggtcacttcaggcttgagtgcaggcgataaagtcatcactgacggactgcaaaacgttcgcccaggagccaaagttaacggcagcgaacgcaaggccgccgaacctaaagtggacgcaaatctgtcaatgactgacccatccgcgcaatagaggaacacagatgtctactttctttattaaccgcccgatatttgcctgggtggtcgcgattgtcattatgatagccggtgcgctatcgataatgaaattgcctgttaaccagtacccaaacattgcgccgccagccatctctgttgccgtaacctatccaggtgcctccgcagagacgacccagaacactgtggttcaggttatcgaacaacagctgaatggtcttgatggcctgcgctacatcgaatcgcaaagtgccagcgacggtagtgccaccatcatcgtgaccttcgatcagggtaccgatccggacatcgcgcaggttcaggttcagaacaaggtttcactggccgaatcccagcttcctagcgaagtggtcgaccagggtatccgcgttgccaaatatcagcagaacttcatgctggttgtcggtctggcgtctaccgacggcaagatgagcaactccgacctgggtaacctgttggtgaccaagctggaagaccctatcgttcgtactaaaggcgtgggtgacttccaggtattcggctcagaatacgcgatgcgtatctggctggatccggccaagatgtataagtactcgctggttccaagcgatgtgactaccgcgatttctgcacagaacgttcaggtttcttcgggttcactcggcggtctgccaacgattaaagattcaaaacttaacgccaccatcatcggtaaaactcgttttaccagcgttaaacagttccaaaacgtgctgctgaaagtgaatgcggacggctctcaggttcgcctgaaagacattgctaacatcgatctcggccctgaaagctactcgattgcgggggcttacaacggcagcccggcgacaggtattgccctgcgtctggcaaccggtgcaaacgtgctggataccgctaacgcggttaaagcgacgatcgacaacctgaagtcatcactgccgcaaggcgtagaagttgtgtatccataccagacctcaccggtggtgagtgcatcgattcatgaagtggtgaaaaccctgattgaagcgatcatcctggtcttcttcgtgatgttgctgttcctgcaaaacctgcgcgcaacgctggtaaccacgttggttgtgcccgttgttctgttgggtactttcggtctgcttaatgcatttggcttctcgataaacaccctgacgatgttcgggatggtactcgccatcggcctgttggtggatgacgccatcgtggtggtcgagaacgtcgaacgtatcatgcatgaggaaaaactgccgccgaaggaagcgaccatcaagtcgatgtcgcagattcaaggcgcgctgttcggtattgccctggtgctgtctgccgtattgatcccgatggccttcttcgcgggttcaaccggtattatctatcgtcagttctcgataactatcgtttcggcgatggccctgtcggtactgatggcgcttatctttactccggcgctgtgtgccaccattattaaacaaggttctgaagaccataaaaccaccggttttgccggctggtttaaccgtaactttgataaaggcgcggctaaatacacctcaagcgttgcgggcgttatttcccgtcgtcgcctgttcatgtgtatttatctggttatcgttgtggtgatgggttacatgtttactcgcgttccaacgaccttcctgccggacgaagaccagggcatcctgttcgtacaggcgacgttgccagccaacgcctctgccgaacgtactcaggcggtgttggacgacgtgcgtgattacttccagaagaacgagaaagccaacatcgtttccgtgtttaccgccaacggcttcagcttcgccggtcgtggtcagaacgtcggtatcggcttcgtttctctgaagagctgggatgaccgaccgggtacgcaaaacagcgtgcagtcgattgccaaccgcgcgatggctcacttcgctacgctgaaagacgccaaggtgttcgccttcgtgccgccagccgttctggagttgggtaacgccaccggtttcgacttctatctcgaagataccaacgcgcagggtcacgcagcattgatggccgcacgtaaccagttccttggcatggcttcacaagacaaacgcctgatggcgacacgtcctaacggcatggaagatgaacctcagtaccagctggaaattgatgacgaacgtgcacaggcgcttggcctgagcctgagcgacatcaacgccacgctgtctgcggtgtggggttcaacctacattaaccagttcatgttcaatgaccgcgttaagaaagtgtacatgcagggtcgttcagcttcgcgcgtcacgcctgaagatctgaacaaatggtacttccgcaacagcgcgggtcagatggtgccatggtcagcctttggtaaaggcaaatgggtatacggctctcctcgtttcgaacgcttcaacggcgtctcctccgtagagatcctgggttcaccagcaccgggttacagctcgggtgatgcaactcaggcggtgctcgatattgccaaaaaactgccaccaggcttcaagattgcatggcacggtttgtcatacgaagaacaggcggcaggttctcaaacccctgcgctgtatacactgtcaattatcgtggtgttcttgtgtctggcagcactatatgagagttggtcaattccattctctgtcatcctagtggtcccattgggtatactgggtactatcggtgcagtactactccgtggattgtccaacgacgtcttcttccaggtaggcctattgacgacggtgggtctggcggctaaaaacgccatacttattgttgagtttgccaaagagctacacgaaaaagagggaaggtcgatcaccgaagcagcaatcgaagcagctaaactgcgtatcaggccaattattatgacctcgatggcgtttatcctgggtgtaataccgctgaccatttcgcatggcgcaggttctggtagccagcactcaatcggtactgcggtagtcggtgggatgataacagcaacattcctggcgattttctttgttcctatgttctacgtggtcgtggtcaacctatttacccgtaagtcaaaaaaacaagataagccgcttttagatactgaggtttcgaaccatgaataaaccacgttttgcgctgcccctcttctcggcgctgacactgactatattagccggctgtaccatggagcccaagtacgagcgaccggcgttgccggttgccagtgactggacgaccagcaaaggcgttgacgctgggaaggtacaggatatcggctggagtcagttctttaatcagcctgatatgaagcaggtgattactttagctctggcaaacaaccgcgaccttcgggtcgcggcattaaacgttgaaacggcgcgtgcaaccttccagattgaccgtgcagccctgctgccgacgctggatgcaacgggcggtgaaaccgcaacgcacctgccgggcggcctatactcaacgcagtctaccggtccggtaacctaccgtgattactcggcgggcgtgggcgtcagcgcctacgagctcgacctgtttggccgcgtacgcagcctgcgtgaccagggtctcgagacctacctggctacggcagcgactcagcgtgcaacgcaaatcacgctggtgtcggaagtggcagaaggctatctgagcctggcggcggataacgacttgctgaagctggctatcgatacggccaaaagccagaccgattcttacaacctgaccaagcgtagcttcgatcagggcgtgagtaactcgcaggacctggcgcaggcagaaaccaccgtacgcagtgcacaggctgatatcgcccagtacacccgtcaggttcgtcaggacgtaaacgccctgactctgctggtcggtaccgagatcccagtcaacctgctgcaaaatgctagcctgaaagacaactggaacttcccgcaaacgccagcaggtctgccttcagacttgttgacgcgtcgtccggacatcatcgcagccgagcatacgctgaaagcggctaacgccaacatcggtgcagcacgtgccgccttcttcccgcgcatctctctgaccggttctgccggtaccgagagcggaagcctgagcaatctgttcaggggcggcacaggcgcttggtcattcggcccgtcaatcagtattcctatctttgacggcggcgtgaacagcgcgaacctggatatcgcaaaaaccgagaagaaaatcgagatcgctaactatgagaaagcgattcagacggccttcaaagaggtttctgacggtctggcaggtcaggcaacctacagcaaccagttgaaatctgttcaacaggctaccgacgccaaccagcgcaactacgacctgtcgcagcagcgcttcaaaggcggcgtagacaactacctgagcgtgctggttgcacagcgttccctgtacgcagcgcagcagacgctgatttcggtcaagctggctcagttgaactccgacatcacgctgttcaaggcactgggcggcggttggaagaaataatccttccacttggctgttaagcctgtaaaaaaggccgcaacggataacgttgcggcctttttttatttcccctgagcgctaaacgccagcctcggcgggcgttttttatcgggattatttctcgtccggggcttgccatccaccgcctagcgcggcgatgagtttcacgctggtgaccatctgcgtactgagcaacgacagaacgctttgctgctgcgtcaggctggtgttttccgtagtggcaacgtcaagataatcgatcatcccgcctgatactgattgtaggtcacccgcgcagactccttggcagagtccgcggcgttcttctgcgccaccatctggctgtcaatcacgcgcagttcaaccagataatcctcaacttctcccatggcggtcagcacgctctgacgataagacgcgacgtccgcatcgtaagtcgccgcagcctcagccaccttgccgcgcgtagcgccgaaatcgagcaccgtctggctgagctcaggtcccagtgaccagacgcggtttggcagtgagaacaggttgtgtagcaccgagctgctgaaaccacccgatgcgctcagggtgatgtcaggataataggcagcggtcgccacgcccacggcagcgttggccgacgccatggtgcgctcggccgccgcaatgtctggacgacgctgcaacagctgagaaggcaacccagccggaatggccggcagcgtgaacttgataggctcggccgccaggctgaactgcgccggaggcctgccgataagaatagcgatagcgtgctcgagctgcgcacgttcccactggagctgcagcgccgaggccttagtgctttcaagctgcgtctgcgcctgcgccagcgtcgcacgcgaggtgttgccgccggtatactgattctgaatcacggtcaaatagcgctgataggcctgaatactctgctcatacagcgcaatttgtgcatccatcacgcgcagctgaaagtagtcctgcgccagctcagactgtgcgctcaaggtggcgttggctaggtctgccgcgctggcctgcgcattggccttctgctcttcctcggtgcggcgcagcttgccccagatgtcgagctcccagcttgcccccagctcggcggagtgctgattgctggtggttgtcgccgtgccgctgcgggtactgtcgaccgttgccgtcacctgtgggaacagctccgccctcgcctgcgtcaccaatgcctgcgcctcacggtactgcgcggcgtactgagcaacgttctggttggaaatctgcacctgactcatcagagaggagagctgggggtcctgataaaccgcccaccagtcacccttggtctgattctctttcggcgcggccgcggtccagcctttggcctctttgaactcggtcggcatggtaaccgcaggacgatgataatcagggccgacggcacagccgacgaccatcaatgccagcgccagcggagccagacgaaacgctattgaacctgctttaggacttgtcatcaccggcttcactttattgagataactattattcatgatcctgcgctccagttggcgtgtggtgcggacgaatacgcgcccacaaacgcttggtcgcacgactgcttctatccatatacaaatacaccaccggcgtggtgaacagcgtcagaacctgactcaatgccagccccccgcaatcgccaacccgagcgggctgcgcaagtcggcgtccccccgctgcccagcgccagaggcagagcaccgaaaaacgccgccagcgtagtcatcatgatcggacggaatcgcatcagacaggcctgaacgatcgcctgctgcggcgtgagccccagcctacgctcggcgtccagcgcgaagtcgatcatcataatcgcgttcttcttcacgatacctatcaacagcaggataccgatgagggctatcaccgtaagctgcgtattggttatcagcatcagcaacagcgcaccgagccccgcagaaggcagcgtagaaaggatagtcagcgggtggatatagctctcatacagcatgccgagcacaatatacaccgcggccagcgcagccagaatcagccatggcatctgctgtgccagcgcctggaatgcctgcgccgtgcccgcataacccgcctgaatggtatccggcagagcaatttgcgccatcgccgtcttgatggcggcctgcgcctgctcaatggacacgccgtcggccaggttaaacgccagcgtagtggtcgccatctgcccctgatgcgccactgacagaggcgcattggcgctactaaaggtagcaaacgccgagagtgggacctggtttccaccgctggttatcacatacatctggttcaatacgtcaggatcgctggtaaagtccggcgtcaggtacatcaccacgtgatactggttcagcgtcttgtagatggtcgccacctgacgctgcgcaaaggcgttattgagcattgcgtcaatggttttaacgttcacaccaaggcgcgtcgctttatcgcggtcgatgttcagcatcacttcctgaccgcctgtctgggcatcagagtcgacgcccgtcagctctggcagtgccgtcagcgcggccttcactttcggcccccactcgcgcagcaggtttagatcgtcagcctgtaggctgtactgatattccgcattcgcgctacggccaccgatacgtaaatcctgtgccgccatcaggaacagctgcgaaccgggcaacttggaggtttccatcatgatgcggttggcaatctggttggccgttgatttgcgctgatcaaaatctttcaggcgtatgaaaaagttagcggtattacgtgaaccgaaaccgccgctgcccgccgagctcattaccgccgcgacatcggggtcatgctggataattttggcgtagttgatcatctgtggctgaatagactggaacgacgtgttctggtccgcgcgcagcatcccaaacaccatgccggtatcctgctccgggaagaagcctttctcaaccacggtatagagatagaagttaagcgcaaccgtaagcaacagaacaaacatcgttaacagttgatgacgcatcacccaattcaatccgcgcgagtaagcttgcaacagcttattcagccagcgctcaatcaacatatagatacggggttggcgtttctctaccggcggcctgcggcgcaggaagcgggcgcagagcattggcgtcagcgtcagcgacaccagcatcgagatgaccagagagatagacaacgtgacggcaaattcacggaacagccgcccaacgatactgcccattagcaaaatcggaataaataccgcgatcaacgacagcgtcattgaaagcacggtaaaaccgacctcgcccgcaccgcgaatcgccgctctgacgggactaaagccctcttcaatatgccgggtaatgttctcaagcaccacgatggcatcatcgaccacgaatcccgttgcgataatcaacgccatcagcgacaggttatcgaggctgtaacccagcaggtacatgatggagcaggtgccgatcagtgaaaccggcaatgccagcgcggggatcaacacagcacgaatattacgcaggaacacaaataccacggcaattaccaacagtgtggcttcaagcagcgttttctctgtgtcgcgcagtgactcagagacggtgggagaacggtctagtccgaggttaagttttacgtctcccggcagttcgtgctccatctctggcaatgcggccttgatggcgtcgatggtatcaagcatgttggcaccggcctgacgggtaaccgcaatcatcaccgacggcatgccgttgaagtagccgacgttgtacttgtcttccacagaatcatacacgttggcgatatcgctcagacgaatggcggtgccgttcttataggtcacaatcaggcgacggtactgggctgcggtgctctgctgaccgttcccttccaccatccacgactgaccgttgccctgcaatacgcccttcggcaggttggtggtgctgtcggctatcgcggtacggatagtatcgagcgagatcccataagaactgatcgcctgcggacgcaggtcgatgcgcacaccgggcaaagcactcccggtcagtgaaacctgccctacgccgttaatctgggcaatcttttgctgcaattgactcgacgcaatgtcgtacagctcgccgttgctgcgcgtggctgaggtcaacgccagcatgataatcggcgcatcggccgggtttgccttacggtaggtcggcaatgaaggcatgctgctgggaagcagagatcgcgaggcattgatagccgcctgcacgtcacgcgccgcgccgttgatgtcgcgatccaggtcaaactgtagcactatccgcgtcgaaccctgcgagcttgacgaggtcatttcagtgacgcccgcgatggtccccaacgccctctcgagcggtgtagcaaccgtggcagccatggtttccgggctggcccccggcaggctggccgagaccatcaccgtcgggaaatccacctgcggcaaaggcgccacaggcagcaggttatagcccagcaaccccagcagcacgatggccagggttaccagcagcgtagccaccggtcggaaaataaagaagcgggaaatattcattcctgttcctgtactttacggcgggcaggacgccagcgcgtagccagtcggtcaaacatcagataaataaccggcgtagagaacagcgtcagtacctggctgaagataagcccaccgacgataaccagacccagcggctgacgcagctcggccccgctgccgctcgcgagcatcagcggcagcgcgccaatcagcgccgccatggtagtcatcagaatcgggcggaaacgcagcaggcaggcctgatgaatcgcatcgcgtggcgacagatgctgcttatgttccgcctccagcgcaaagtcgatcatcataatggcgttctttttcacgataccgatcagcaatatcacgccgatgagcgctatcaggctgaactcggtgttggcaaacagcagtgaaagcagcgctcccaccgccgccgacggcagcgtggacaggatggtgaccgggtgaataaagctttcatacaggatacccagcaccacatacatcgtcagcagcgcggccaaaatcagccacagcgtgttgccggtagcgctttcaaacgaggcggcagctccctgataactcaggctgatactctcgggcagaccaatctcttcactggtcttcttgatagcttcctgcgcctgttcaatcgagtaaccgtcgttgaggttaaacgaaaccgtcaccgccggcatctggttcaaacgcgcctgtaacagtgcgccggtgcgcatatgaatgctggcaatcgaggtcagcttcaccatcggcgttggcgtacttgacgaagaggtggtggtcgaactggtgctgctggtgctcgaactgctgtcagagcttgaactgctcgaacttgagctgctgctggagtttgacgagctagaactcgagctgctggaactgttgctgcctgccagataaatatcgttaaacgaatccggtgactgctgatacttcggcgcgacttccaacacgacgcgatactggttcgcctgggtaaagatagtcgacaccagacgctgaccaaacgcgttgtacagcgcggtatcgacgtccgacgcggtaatgccgtagcgggaagccgcatcgcggtcgagatcaacataggcgacctgcccctgctgctgcaggttactgaccacgctgttaaattccggctgttggctgagtttatcgagcagtttaggcgtccagctcaccagattagtgctgtcggtatccgagagcatgaactgatactggctcggcgtaacctggtcgtcgacggtcaggtcctgcgaggcctgcaaataaagctggatgcccgcaaccaaggccgtttcctgcttcaggcgcgcaatcactgccggggcacgatcgtcgcgatcggcaatcggtttgaggttaatctgcaagcgaccgctgttcaggctggtgttattaccgtcaacgccgatggtcgatgccacgctctcgacgtctttatccttgagaataatttcagccagtgcctgctgcctgcggcccatttcgctgaacgaaacgtcctgcgaggccatcgttatcccctgaatcaggccggtatcctgcgacgggaagaatcctttcggcacgataaggtacagcagaccggttaaaaccagtgtcgccagcgcgaccaacagcgttaaacgctgatgattaagcaccacggtcagcatgcggtcgtaaccggcaatcagtttgtcaaatacttgcccgcccttacggtaaaacttgctctgtttctcttccggaatatgacgaagaaggtaggcacacagcattggcgtcagcgtcagcgagaccagcatcgacacgataatcgacaccgccagcgtaatcgcaaactcgcggaacagacgaccgaccacgtcgcccataaacagcagtgggatcagtacggcaatcagtgagaaagtcagtgagatgatggtaaaaccaatctgctgcgagcctttcagcgccgcctgcatcggcgtttcgccctcttcgagtcgtcgagagatattctcgaccaccacgatggcgtcatcaataacgaagccggtcgcgatggtcaaggccatcagcgacaggttattgaggctgaatccgcacaggtacatcacgccgaaggtgccaaccagcgagagggggacggcgacgctcgggataagcgtcgcggcaacgttgcgcaagaacaggaaggtcaccatcacaaccagcgctatcgacagcaacagttcgaactgcacgtcactgattgaggcacgaatggtctgcgtgcggtcagaaataatgctgactttgacagagtccggcagtgccgcctgcagtttaggcagctgtgccttgatgtcatcgaccaccgaaataacgttggcacccggttgacgctgcacgttgatgatgattgccggtttgttgttggcccacgcggagagatactggttctccggcgcttcactcagcgtcgcgatatcgcgcagacgcagggcggcgccgttgctggtgttataggacacaatcaggttgccgtactcgtcggcggtgcgcagctggtcgttagcatcgatagtaatcgagtgatgcgggccgtcgaagcctcctttcgaaccattgacgttgctgttgctgataagggtgttgatatcctccagcgtcaaattatgtgccgccagcgcctgtggattcacctgaacgcgcaccgcaggctggtgtccaccggccaacgtgaccagacccacgcctgaaatctgcgacagtttgagcgccatacgggtattgaccagatcctgcaccttggtcagcggcagagaatctgaggtgaccgccagcgttataacggcgctgtcggccgggttgacctttttataggtcggcggattcggcaagtcactcggcaacaggctgtttgcagcgttgatggccgcctgaacctcttgttcggccacgtccagagacaggtccagcgagaacttcagggtgataatcgaagagccggtcgaactggtagagtacatctggctcaggccagccatctgcccgagctgacgctcaagcggtgcggtaaccccgaggccatgacgtcagggcttgcgcccggatacagcgtcgtaacctgaatcgtgggatagtcaacctgcggcagcgccgaagtcgaaagcatgttgtaggcgaaaatccctgacaacagcacggccaccatcaatagaatggtggcgaccggccttaggataaagaggcgtgatggattcatttcggcccgctgtctttgccggtagtcgctttgtctacgccggttttatcggttttcttggtcccggctgcggcggccgcgatgctgtcagcggagaccacctgaaccttggtgccgtcattaaggcggtcaataccggtggtcaccacctgctgccccggcgtgacacccgagagcacggcgatttggtcatcgccatagttaggaccggcttttaccgcctgccgcacgaccgtgccgtcctgcttgaccacataaacgaagtcgccgtcggagcttaactgcagcgcggcagaaggaattaccgtggcgttttccagcgtaccaatttgcagacgcgcattcacgaactggttcggataaagcgcgtcatccttattgtcgaatatcgccttaagctccacgctgccggtggtggtgtcgatctggttgctcataaactgcaactttccctgtgcgagcaccttgctgccgtcctgatcgaaagccgtagtcggccagttttgaccgttgtgcagcgctttcatgatggtttgcaggttgctctgcggcacactgaaggtcacggcaatcggctgagtctgagtgatggtaacaatcccggtggtcgaactgctgctgacgatattgcccgggtcaaccagacgcaggcctacgcgaccgctgacagggcggtaatgcgcgcatagacaaggttaagttttgccgcattgatctgcgccaaatcggctttgactgcaccgttatactgcccggcagtcgcttcctgagtttcgaggtcctgacgcgccagtgagtcttgcgcgtaaagtttacggtagcgagccagcgtcagttcggcacttttagccagcgcctgattctgcgccaggtcgccctgatactgttcgagcgtcgcctggtagctgcgcgggtcaatctgcgccagcagctgcccttcttcaactttttgcccttcggtaaagtagactttcatcagctgaccactcacctgactggtgacggtaaccgacgcgttcgggacaacggtgcccagcgcacgcaaatacaccggcacattagcctgtgatgcgacacccgcctgcaccggcgttgcgcctcctcccatccccggcattccgcctctcattccgccgcgcataccgccacggtgatgtgcattgccctcaggcgctccgccttttgacgcacttttatgaaaaatgaagaaccaggctacgaacgccagtacgattacagcgagaataaaccacaaagttttgcggtttttagagcgagatgtggcagttggcagcataaatttcttagttcgcacgagtgatgggaagaaaacagctgaaaaaggtcgttcaaccagaaaggtccattatccagaatttacagggagactgtttttagggcaacgtaaagattgcgcaagtaaacatctccggatgattcgtggagacagatactttacacaacaatgtaaatgataacgttttgtgattaaagggataaaaactatggggataattgatgaggctctcacgttaggagagccgtaaaaagttattttccgccgtcgacgctcagaatctgcccggtgacccagtttgcccagtctgaggcaaaatagagcaccgcatgagcgatatcttccgccacaccgaggcgtttgagggcaatattgtcgatgagacgtttctgaccttcgctgcccatcgcttcccactgtttttccgttgacggattactgcggataaaaccgggtgcaacattattgacggtaatattccacggccccagctcgtgcgccagctgacgcgtcaggccaatctgtcccgccttggcgctggcgtaggcctgaatgccggtcaggctgatgtccagccctgcccggctcgagatattaatgatgcggccaaacttgtgcgctttcatgcccacgaccgccgcctgagacatcaaaaatgccccgttaagattaaccgcgacaatcgcctgccactgggcaaaagtcacctcttcaagcggctgcccctgctggcccaccacaccgcccgcattattgaccaatgtatcgacgctcagatggcgcgcctcaagggagctaaacagcacgctaatcgcctcgggcgagctaatgtcgacctcatacgccagcgccgtttcaccacacagcgccgccgtctcctcgacaagatgtttttgaatatcacaggcaatcacccgcgcgccacgctgggcaaacgccagacaaatcgcacgcccaaacccttgcgccgcgccggtcaccagcaccgtgcggtgcgaataatcaaaaggattttgcattaaggcgttcccgtctcatgaagttcaagccgcgccagcgtttcaaaggtctgcggcagttcaccgcgttcaacccgatgaataagctgcaccagtcgcgtggtcagcggcattggcaggttaaagccgatgccgatatcgatagccggagcaatctgcgcgtcgatttcggtctggcgtttacgcaccgccaaatcacgccagatgccggaatgcgactttgccgagcggcgattgtgcgccaccatgtcgtcaaaggattgttgggtgtgctcgggcgtagcattcggcagaaacgccgaaggatcaaagccgtcgaagccctccaggaggatgttctgcgcatgcgctactgcaccgatttctcgcgcaagctgggtcaatactgggcgaaagcgcggcatcgccagcacgtcggcaatactgtcgtcggtgagcgcggtggcgaacagcagcgcgccgtaaatcatttttgcccacaggaatccccagatattgggcgtcagaacagcggcagggtcgaaatgttgaaggaggcggtaaagcgcctcggtgcgcggccgggtgattccgtccagttcgccgatgaccaccgcaccgcgtccaccgtggtggatgacgcccggttcgaggaagtctgccccaaaattaagaaatgcgccaacggtgcgctcggcacctatcacgtcggcaatgacccgctcgttgaggccgttttgcatcgagacgacgtaaccttcaggagcaaggaggggcgctatctgatgaatggcggcggcggtgtggtgtgacttgaccgccagcagcacaccgcaatgtaaaccttcaagctgctcgggtaaaaacgcctgcgcatgcaccgttttatcgcccatcgggccggtaattcgcagaccgtgcagattgatagcggcgacatgttcggcgacattatcgacaaaaatcaccggctgtccggcctcgataaaggaggcgcctattgcaccaccaatggcgcccgcgccccaaatgaccagcggtgccaaggcctgaggctgttcagggtaactctcttcttcaagctgagtggctactgacatgcgttcctcctccgagaggtaaaccttgacgcgtctcgcgccgtggattcatgaaaggcagcctacagcgcgtcaataacctcgcggatttcagccagtgcggtttgccagattgccagcatctcgtcatcggcccgctggtagtaaccgccgtagttgccgtctccgaggtaagccctggcgcgcgtcgggtccattttccgcagagcgaccaaatcgaccatcggcttttgctggtccggctgcgttacgccggctaaacgcgtccacgggaagttttccatccacgaagcgtgtgaagcgacggggtcgatggacatcactttttcccaggtttttggcgcattccaccagttgtgcagctgcaccgtcacgcccggattattgaccatccattcgctgaaaatgttctgcgcaggcgagttaccgccgtgaccgttgacgaacaaaattcgacgaaatccctgacgcttcaggttgttaagaatgtcgctaagcagacagacataggtttgcatactcagactgatggtgccgggatagtcgctaaacgcgggcgtcatcccgaagggcattacggggaagacaggaataccataaggctctgcggcctctgatgccaccctttctgccaaaatcgagtccaccgacaggctgagcaaagcatgttgctcggtgctgccgagcggcacaatcactcgatcgtcggtggttaaatagctttctaactgctgccagttcatttcactgattttcattgcggtccccggtgttggacgcgtgtaaaatttccttctgcagcagcggaacgacgacccgctgaatctctcctgcatcaggaacatgcctgtactcaaaagaaatctgcccttcactcaactgagcggtgagatcctgagcgccagtggcgtacaccagtgcatcggtctcttttaataattcgccaagctgagggtcatcgcggtggaccacggtgacctgggtaacgtgtggtgcaaaacgcgctacgccgtgagtcatcagcgacgtaaactctggaaaaatcgataccaccagcgtgcgggtcagcggctcaagcgaggccagcgaacgtcgcgtggtttctgacggtataaaactaatattcatcaatgcctgacccggaaacagctggctgacctcacgccgacggtgggcaaaggttaacagcagatcggcactagaaacgtgctgacgcagcagttcgtcatttctcaggtcggtcagggttgtggcttctactactgcaatctcacccagcgtttccgcaatgcaatgcgcgtaatcccttgccgaatcgatgaaattaccaatcaaaaatacggttttcttcttcagctgccgctgcctttcgctgaagcgattgctgaccagggcgcctaaatcggtagcgctgaaaccgagcaggatgccgcagttaatcaacgcgtcgagatgttgatgcagctcgtcgagattcagccccgaagaccccaccagcatcgacgcatcggcgataaacgtgcccgcaccgggcttgctgtagaccagctccgccgccttgagctcgcggtagacctgcgccacagtcatgggtgcgacgccgagtatgtcggccatttccctcaccgaaggaagctgctccccaggctttaacgcgccgaaggtgatcgcatattcaatcatgccgcgcagctgtgcgcccagcgggattgaagagtcacggtcgaggtggaattccatactctgccttgatgagtgtactggtctgctaatacaataatgctgttttttacggcaatgcaagatgttataaaaaataaatagcgataaaatcgccaactttaataacaaaagctcatttgttgcattttttttgcgctgattattgacaatctgtgaccaatgcttcaattatcgtattagttaactagaacacaatcatcaccgccatttttgcaggctccgcccctggtgtttttcagggcggcatagtcgttcctgacaaacattttattctgactaacagagaggcaaggtaatgaaagttatgcctaaattgactttaattgcactactggccgcgggcgcgctcaacgcgatttccgcccaggccgcagaggtagtacagcgcggcggtacactgacctacggtcgctttggcgacagtattttcctcgaacccgtacttaacgaaagcaataacgatatctggatcttatccaatctctacgacacgctgctgttaccgaccaacgacggcaaaggcttcaagccaggcctggcaacggcgtggaaactgtctgaagacggtaaaagcgtcaccttgaccctgcgccccaacaccaaattctctgatggctcaccgattaccgctgaagacgttaagtggtcgcttgagcgtgcctccaagccgggcaacggcgtgtggcaatttctggtcagcgcaatcgataacgttacgataagcgatccgcatactgtggttatccatctgtcgcataccgatccggcgatcctgactgcgctgacggtgttcaataccgctatcatgccggagaagcagtttgaggcggaaccgggcgcgaccgaccacgacaaagcggcggcattcgccgaacatccgattggatccggcccgtttgtcttaaagtcgtggcagcataattccaccatgacgctggtccgcaacccgtactactgggccaagggcgcggacggcaaggcgctgccttacctcgacagcatcaagtttgaaatcatccctgacgacgccacccgtattctgaagctacagtccggcgagctggacggcgcagaatttattccttattcacgcgttaaagagctacagggcaacccggcgataaacatggcgctgttcccctctacccgcgtagaagtagcgagtgtgaatgcccgtcctgaaatcgacggcaagccaaacccgctggcgaacccgaaggtgcgtgaggcgttgaactatgccaccgacaaagacggtattatccagctggtgaccttcggtctcggcaagccgatgacctcgtttatgtcgacctctaccccgctcaactcaggcaccaaacctctgtggccggtcgacgtcgagaaggcgcaggcattgatgaaagaggccggttatcctgctggtttcagcaccagcatgaatattctggcgggtaacgaagacagcctgagcatcgccaccggcctgcaacagatgtgggcgcagattggcgtcaaattgaccatcaaccagatggacaacgccacgctgaacgccaacttccgcaagggtaacttcagcacgcgtattgggccgtggaccgacgatatcgccgatccgaacgagattacgtcctactacgcctactcgaagaacattcaggcgctgcactccggctggaagagcgacgagctagacaaactgttcgaagcctcgcagcaggaaatcaatccggccaagcgcgccgaagagtacaagcagattcaggatatctacaacaccagcggtccaaccattccgctgtatgagagctcctaccctgtcgcgctcaagaaagacgtgcagggcttcgtgcagatcccgctgggtaataacatcttcaccgagacctggctgaagaagtaacgggtctttttacaccgagtaaaaacctgatccctggcgctgtcatcctttgaattacagcgccagtgatgacgggtttgggagtgagccttgactgagctttcgtatatccttaaacgcatcctgctgattattccgacgctgctggtgattttagtggtcaccttcactatcgtgcgcctgctgcccggcgatccggccagtgcgatgataggcgatcgtgctaccgacgccgacgtcacccgcatcaacaaagagcttggactcgaccagcctctgccggtgcagtttgtctattttgtgcgccaaattgccagcggacatctggggaactcctatgcgatgcatgcgccggtgacctcggtcatcgccgaacgcttaccggtgacgctgctgttgaccggtatggccgccctgttctcggtagtgatggctatcccattggcctttgtctcggcgcttaagcgcaataccgccaccgatatcaccatacgcggtgcgtcacaggtcacgctgtcgatgccctctttttatatcgggctggtgctgctgaccgtattcgccgctcaattacactggttcccggtcggcggctacggcgacacctggggacaaagggtttatcacctgtttctgcccgcaatgacgctggcggtcagtattacctcggtgctgataggcagcctgagaaactccattattgcggtgctcgacgccgaatacattaccttcgcccgcgcgaaagggttaagcacgcgcgtggtgctgatgcgccacgttctgcgtaactctctgattccgatgctgagcctgtttgcgctcaatattggcaccactatcggcagcgcggtgataaccgaaaccgtgtttgcggtgccgggcatcgcacggctgatggtcgacagcatcttcagccgcgactacccgatgattcagggattggtcatcgtactgtccgtactggtctcgctgattttcctgctcaccgacatcgtgcaggtgatgattgacccgaggagagcacgatgagtgagctcattgcccaacgttcaatcacccgaaaatggcgcaaacatctgccgtggtcatcggttctcggctgcgtcattctggcgctcagcctgctaatggcgtttttcccacatctggtggccacagcgagtccgctgaagtttgactatcgcgccatcctcaaagggccaagcctgcaacatttttttggcaccgataactttggtcgcgacatcttctcgcgcgtggtttacgcctatcagatagacctgcaaattgcctttttcaccacgctgttcccgatggtgttcggcactctggttggcctgctggtgggctatttcggcggcgttgccgaaatgttattccagaggattgttgatgcggtagtcaccttcccgctactggtgctggtgattgccatcgtcgctatccttggcccaggcctgaacagcatgtatatcgccgtcggcatcatttactgggtgttttacgccaagcttatcgccggcgaagtcagcattcagaaacggctggagtacgttgcggcgggcaaggtcatgggttacagcacgccgaggattatcttccgccacgtgctgccgaacgtcattaccaccacgctggtgtattggatgacggacatggcgctggccattctgctcggctcgagcctcggttatctcggcctcggtgcgcaaccgccaacggcagaatggggtgtgcttatcgcctccggcaaaaactttatggataccgcatggtggataactatcttccccggtatagccatcgtattaaccggattgggattcagcctttttggcgacctgttgtcagactggctgcgtcctggaagccgctaagccttggatcgacaactgatgacaagccgttagcaaaaatgagagcaaactatgccgagccaaacgcgcgaacaacacagtgacacaacaaatttgctcgaggtgagccagctcaacacccaaattcatacctctcgcggcagcctgcgggcaattcaggacgtcagctttagcctcaagccgggagaaatactcgggttagtgggtgaatctggctcaggaaaaagcgttacgctgcgctcgctgctgcgtctgatgccgtcgagcgccgagatttctggctccgttaaatggcagggccgcgagatctcgaccatgaaaccggccgaactgcgcagtattcgcggtggtgaaattgcgatgatttttcaggagccgatgattgcgctaaatccggtactcaccgtgtggcggcaggtagaagaaagcctgcgcgcgcataccgatttaaaccgcaaacagcgacgccagcgcgccattgagctgctgaatcaggtcgggatcccggcccctgaactgcgcctcgacgactatccgcaccagttttcaggcgggatgcgccagcgcgtgatgatagccattgcgctggcgggtaatccgcgccttctgctggccgatgagccaaccaccgcgctggacgtgacgattcaggaacaaatcctcaagctgctgttcagcctgcgcgagcggctcggtatgggcatcattttcgttacccacgacctcggcgtagtggcccagctgtgcgaccgtgtggcggtgatgtacgccggacgtatcgtcgagaccgcgccggtggcagagattttcagtcaacctcgccatccttatacccaggggctgatagcctccgtgccgcaaaacggcggcgagcgtaaaccgctacagtcgattgaaggcaccccgccgtcgttgctgaatctgccgcaaggctgcagttttagcccgcgctgtcgctataaaaccgacgtctgtctccagcaggttccccgcttgagtcactgaattcaacgcatcaggtggcctgttatcatcacgccagcctgagcccgtctgcctcattaaagccgctgccggagggcatataagatgagcgaaatcacggtaaacggcacggtgccgatcgttagcgttgaggaagcgattgttcacttcccggtcggccagtcgattctggacaaaattcaggggaaacctcgcaggtttgtgcaggcgctaaacggcgtacggctggatctgatgccgggggaaaccctcggcgtggtgggcgaatcgggatgcggtaaatcgacgctcgcccgcgcaatggttggcctactgcaaaccaatgaaggcaaaatctacttcaacggcaaagatattgccgccctgcgcggtaaagcgcggcgtagttttaaccgccaggtgcagatgatttttcaggacccgtacagctcgctgaacccgcgcatgaccgttgggcaggtgctgaccgaggcgctgtcggtgcataagatgtgcgccaaaaaagacattccggcacgcatccgcgagctgatggagctggtgcgcttacccgccgacgctatcgacaaactcccacatgagttttccggcggtcagcgtcagcgcattggcatcagccgggcgttggcggtcgagccgaaggtgttgattgccgatgagctggtttcggcgctggacgtctcggtgcaggcacaggtagtgaatttgctgctcgatcttcagcagaaactcagcctgaccgtgctctttgttgcccatgatttaaggctggtgcggcatatttcgcatcgcgtggcggtgatgtatcttggcgaagtggttgaagtgggggataccgaaaccctgttcaagacgccgctgcatccgtatacccaggccttgctgcgcgccgcgccaagcatggatccgactgaccgcggtaaaaatgtcagcctgaccggcgaactgccaagcccgctctcgccgccttcaggctgccgattccacacccgttgcccttacgtgaccgaccgctgtcgcacggaaaggcctgttctggcgttaaaatcgggcggtcagcgcgtcgcctgtcatttagtgccttttgaatcatagagaaacgagaaaaccatgaacgaaaaaaatcccccactttctctggcgctgcacggtggctgtggcgtgatggccgaagaggacatgaccccgcaggagtgggaagaggcgcgtgaccatcttaaacaggcactacgcgctggctggaaaattctgcaacgcggcggcagtgcgctggatgcggtgcaggccacggtgctggtgatggaagattcggtttatttcaacgcaggctacggtgcggcattgaacgccgacgcagaacacgagctggatgcggccatcatggacggcgcaacgctagcggccggtgccgtctgcggggcaaggcatatccgtaatccggtgctggcggcacgcagcctgctcgacgccggagaaagcgtattgctgagcggtgcgggtgccgacgcctacgctgagcagaagggcctggcctgcgtcgatagtgactatttcaccaccccgcgtcgggttgaagcccttgcagccatgcgccgccatcagatagcggggacttacaaggcggcgagagaatcagagaaacacggcaccgtgggggcggtcgcgctggacgtgaacgggcatctggccgccgccacctcgacgggaggttacaccaacaaaccggtgggtcgcatcggcgacagcccgctgattggctccggcacctatgcgcgcgacagcgtctgcgcgatttctggcaccggtcagggggaatattttatccgtaacgtgatggcctacgacatcgccgcacgcatgatttacgccggtgaaagtctgcaaagtgcctcggcgcatctggtgatgggcgagtttcgggatctcgggtgggcgccggggtgattgccatcgacgccaacggcaaagtcagcgcaccttacaacacgctgggcatgttccgcgcctgggtcaccgaggaaggtcgcgccgtggtcgccagtcatcatcagctttatgaattcacgctgtgattaaattgaacaataattaacgttgacctcagctttgccattgatatcttaaggtgttgaattttttccttcaccgaggcaaaaagagagccaatatgcccattactccccactccaaaccggtcatcggcgttacgctggatagcgaagaggccggaggatatgccgattatccgtggtatgcgctgcgtcaaaactacatgactagcctggcggagctcggtgctgtaccgctggcgttaccgcatcacggtgagctggcggatgagtttttgaccctgtgtgatggcattattgttacaggcggcgcctttgacgtgccacctgagctgtttaacgagcagcaaagcagctctcaggttcgtctcaaacccgcccgtactgcgtttgaaagtgccatagtcaaagggcgatggtgcgcgacatgccgttgctgggcatctgcggcggtgaacagctgcttgccgttttgaccggtggcacgctaatccagcatatccccgatgctctgcccgaggcgcttgaacacagcactacggttgataccgagaacgccggtggcaagaaacgtgcccgccatccgattgaaatccttgaaaacacgcggctcagcaagttagtcagcgctcgcaattacgaggtcaacagctcccatcatcaggcggtaaaaaccctcggcgcaggctgtcgggttaacgctgtgtcaccggacggtgtgattgaaggcattgaatgcgaagactattacttctgcatgggcgtgcagtggcaccctgagtatttacagcatcagcacgatcgggagttgctgaaggccttcgtggaagccgcagacgactataagaatgcacgccgttcatccggcaaggcgatggcgaaaatactcaatcagtcacgcggagaataaccggccatgcctgcggtcgaaaatttccctcaaatcaggcagtggctcgaagaaatgggcatcgacagcgaagtgattgctcaccgcacgctgccctttttcaaagaagccgagcgcacgctgctggtcacggcagagactaacgccgaaggaaaagcccttcttttgctgcccgaggcggcaaatgcctggcgcaggatgcaccaatgcgccaagaccgctggcatcgacctgtatctggtctcggcctggcgcagcgttgaatatcagatgtcattgatcaagaaaaaacagcagctcggcgtcccgcccgaagaattctttagctaccttgcgccgcccggctgtagcgagcaccacactggccgcgccattgatatcaacacgccagaatgtgatgaagtcagcggggtgtttggcgatacaccggcctttgcctggttacgcgaacacgcccaccagtttggctttgaaatgtccttcccgcctgataatccgtggggctttatctatgagccttggcactggtgctggcaccccgttaaccctgccaataaatcgggtaagtaaataccagcagatgacacatattgagcgcgaaatggcacagcgtgctgacccacagtcggccgctccacatccatgccagcccgtaaatcagccccgccatcgacgcaaacaccaccaacagcagtccgccgccaatgtgtgccagcccaaatatcagggcagcgataaacagcgccgggagatttcccagccatcccgccagacgctgctgtaaatagccgcgaaacagcgcctcttcggcaaacgagacaaaaaacagattcgccagcataaagctgcccagccagcttggaaaatgcagttcaatcttcagcgcacccagcagcatcgcgaccatcagcagcacaggcatgctgaggatcagcagtagccactgccagcatttgggatgataatcagagcgggtaaacaaaagcgtaggcagtgccgcaagcagcacaaacggcatcagcgccttgtcgaaattaaagtacagggtgaacggcgcactgtgagtcccagcctgcacgtcatcaagtatcctgggattataaaacccgggaatctggtgtaccaacagcgccagcgcagcgataaccagcaggatttcacctccggcagtcaggacacgcgaacgccccgtcgcatgcatctttacgcgcgcaatcagtaatatgatgccgagggcaaccacgccacgcagatcgacaacgccctcaaggcaggcccatcccagtgcaatggtccctaacagcagcgccagcctgcgctgaaaaggtaaggcggccaacgagcctgccagtatgcaccacatcatgtccttctccctgaatgttgcagcgattctgcgggagccagtataggggaaatttaatacaggaccttgtactaaacgacaatcgaatcaataatctttggattcgtaactgattaaaataattaaacattatggagcgcaggatggaattgaatatcggcagtacgccgctctacctcaagatattaacgcctgaggatacccgccgggttgaggactatttttcacaaaacctcgcccatctcgcccgctgggaacccgtcaggcccgacggtttttactcgcgcgcccagatacagcagcgtttagccaacggccagagcgaggccgcactgggcagtagctatcagtttggcattttcagccgtgagaatggcgacatgctggggcctgcaattttaccggcatcgcgcgcggcgcatttcaggcctgtcatttgggctattcgctggctgaaaaccaacaggggcaagggattatgacccaggctctgagtcggagtattcaattcatcttccaggacgttgggctacatcgtgtgatggcggcgtacatccccggcaatgaaaaaagcgcccgagtgctcgagcgcctgggtttcgagaaagaaggctacgcaaaatcctacttaaaaattgccggtcattggcaggatcacatcctgaccgccctggtgaatccccacgcataaaattagcgttttttagccggtggcagcgccgcaagaatacgttgtgcctgctcggcggtcagcgagtagccaaagaatcgacggtagaaatcctgcgtcgccgacacaatattgagatcggggaacagctcaggatgcagcttctgcgccgcccactggatctgcaaagccgcctcggtgccgtatctgtcccacgggaaaacgcccgccggattctgccacaccttgtgctgctgcactgcgggcagcgactggaacagctgcgcgtaatcagaatgcgccaacgtccctgcccctgcgccgatgatgatgacgtccggtttccagaccagcacctgctccggtgacacctctttcatgttgcctttcacttcaccggcggcgtttgtgcctcccgccaggcggatccaggtatcaatcagcgtaccgctaccgtcgaccttcaacggatgcagcgaaacgatatgcaaaaccttcggcctttgagcggcggtcagtttgcgggttttagcctggatctcggcgatgtgctggtccagatactgattgtaaagcaccgcccgctgctctgcctctggcgtgccaagcacctctgcggtggtcaggagcgaatgcttcattgaggagaagtcatcgaacgccatctccagcgtaggaagctgcgcctgacgataaccactgacgtcggcattgcctttggcggtaaacaccacgtcggttttatccaccagcagcgtttcgctgttaaatgtcacgccgcgtacgctcaatgctttattgagcgacggctggataagaaacatccaaggatgatcctgcggatgattgacggtggcgattatcttgtcgccagcccccaaggtcatcagcagcgaatgatgggcataccaggcgtcggcgatacgttcgacgtggttgggcacctgcacgcgcgtgcccgcatcgtccaccacctgccgctcggcctgcgcggcgtgaaacggggtcatcatcagcgtggcggccagcaaccacgcccgatttttaaataagtctctgctcatcacgttatccgttatcaaaaatcaacctgcatagagagctgtgccatgcgcggatcgccgagcgaggcgctggcgtaacccgaaccggtataaccattcagaccgcccggcacgatgttggtccagtagtgacggttggtcaggttggtgacgtccagtcggaaagtggtggctgttccgaacaaatcagtacggtagctgccgcccaagtcaaaggtagcgtagctgccgacccaggtgctgttggcattatcggtagcgcgacggccaacgtagtgcgcggcggcgttcactgacataccgcgcacataaggcaggtcatagaccaccagcagatcgctggtcacgcgcggcaggccgacgacctgtttgtcttcggtactgtcgctgccggtgtcgcgcagacgtgggtcaagccaggtcaccccgccaaaaatatgcaggtcaggacgcaggtcgccgtcggccaacagctcgaggcctcggttacgctgggtgccgtcaaccgcataatcaccgtcggttagggtgtaagcgtaagggcgttcaatctggaacagcgccgccgtcagcagcgttttgcccagggtcagcttgctgcccacttcgacctgcttgctgcgataaggtgcgagtatcgacccggcattgttgctgcccgacggcgccacgtcgccttgctggaggctgtcggcataggtggtgtagagcgtcaggttgtcgaccggcttgtacatcaggctcgccgagccgctgaaccccctgttgtcggacgcgctggtgcggctgccggttttggcatagttgcttgaggtcagaaagctttcactgcccgcaagcaatagactccacttgggactaaaggtcagcgtatcgcccatcaggaacgactgctgcgtgctgctggccgaatggtagcggtcggtaaagtcaggataatccggctcgttgaacgacagcgggttatcgagattggctgaacccagcgtggtggtcgcaccgccgaccggattatagtttttccatacgaaaccgcgcatgcccagcgacagatcatgagatacccagccggtatcgacgcggccagagaggttagccatatagctgttaatcacgaaacggctggcggtcgcactggcgaccgttgaggtataagccccagcattgttggtcagcgtgttggtaacagccgtcgactcacggtcggcaacctggtggaggaagccaaactcccccagccagttaccgtcgaagtcatactttaaatgcacgctttcggtggtggtcttgtcgtcatcaccggcgtagtactgcccatatcgaccgtcggtagggttcagcgcgcttgggaacgaggtgccttttgccagcgcaaatttacccggcagccccttctggtagaagtggtaatagctaaagtgggtctgcatggtcagcttgtcggtcagctggaaatccagccccagactcgccaactgtctgcgacgcgtgctgccgctggcatagccgcgcccctcgtcgtcgagcagattaaggcgatacttcacgcggtcttcgctgtcgagagggccgctgagatcggtggccagctgtgtgcccgtgcccgtcccgccgccgacggtgatgctgcgctgcggcgcgtcggtcggacgcttggaaacaaagttgaagatacccgccggattagccggaccgtaaagcgcgcccgccaatccgtttagcacttcaatctgcgaaaactgttcggccggataatcggtggtcgaaaccacgttcaggccgtcgatcatcgagttttgtaccacgctgccctgcatgccgcgcgactgcggacgcgcaccgtcaccctgcacggaaggcagataacgatacaggtcggtcacgctttgcagttgctgacgtttgatgagcgactgaggcagcacctcaacggaataaggggtgtcggcgatggcgcgttttccgaggctgcccatcgtagcctgcttgtcgggtgaggcaggttcagactgggtggtggcctggggagaggtgcctttgaccacaatagtgtcatcggcacgagcctgagacgagagaattaataaagacgcggcgcaagtgaatatacttttatttaacatttatatttttcaggcaaatagttccccaccgcaattaatatgttgcagttatgttgccattacttatcaataaaaagcagtcagaaaattggcaatcaaaaacggggataaattaaacagaaaaataatgctatcatcgatatatatctgtgtatataacgaaaaacctatcatttactgacatttttttattaatatccaggtaattaatttaggttattaactatctaaaagcccggtgggattcattattcgtttagcgtaatagattctatccgccgcctgccgggtattaaagaaatgcagaccacgctggtgctgcgtgaggtcaacccctcacgccgcttccaggacctcggcaatgcaggcagaggttttaaattcagtgaagcccagctcgggacctaatataagtaatgatagtgctcaagcatgttagacatgacgccttcaccagataaaactttaagaaatcacacgcataataatcatggcaataatggagttcaggatgctggtgaccatcagcagcggccagtacttcttcggcacatcagctaccccgagcaagcgtcccatgtactgaagctgtgcgcccatcaggaaaatggccggcgccagtatggtgacctgcgccgggtcaagcgttcccttagtcagcaggcttatcgctaccccggtgccagcagatgaagagagccaggcggtcagcagtaccgttaccgcttcgcccggcagccccagcaggcccattaatggtgcaaacgcgtggccgagaaaattcatcacaccgagcaggttgagaatctcggaaataacgtaagccatgacgacgttgggcatcaggttgttgatagcaatattaaagcccttgcgtgcgccgaccacgaaaatatcgaaggggttatttgaaaccttggcaacattactcattatcgaaatctcttttataaactgtgttcagtgcaaagcggacaaacaccgcgccaacaaacttcataacaaacatcaccaaaagcggaataatcaccggaagggttaatgaggcgaacatcgcggaaccaatcgaaaaatagttattaatcagccccgcaccggaatattgccacgccccataatcacgacgtcttttttgctaatgcgtttactgtcgtaaagctctttactcagcgcagcgcccgcgtcggtactttgcaggtcggtaatcagcgccagtccggtatgcccgggatccccagaatcggcttgagcagcggcgttaacagcttatgtgcggcgcgaatcgccccatagtgggtgaaaatttccagcaggccgagcgccagcatgaccgtcggcaccagcgacagcgcaaacaggaagcccgccttggcgctaatgcccccgcaccgacgaaggtgtcggtagccggatttttcatggtgccaaatgcgccgcccagggtggtaaagtcaaacgcgcccagccacgccatgccgtctactttaagaaaagcaccggagaacatcagaataacggcgatcagcgcaatatacgcgcccttaccgactttccactcttctgcctggtcggcaggtttatcttcggatattcgaacatcactcattgtatttccccctttcactgtcatttcaaaatatcggactcggaaaattaattagcaggatgggtgaataataaatcccgatataatttacacttaaccgttgcgtttgattttcacctgaaagagttaaggcaggatccgtgccaatattaataaaagaggctaaataatataaattactatcggtgagcgacttaaggtaaataggctataaaaaaccgagggaataatgaaatttatcgcagcagaaaaaccacccttatttttataaggatggtattaataacctgactctataccctgacgcgccaacgaccgattgcactcattcggaagaccgtgcaccaaaatagcgccccgttttggcgggcatattgtctggcgctacccggctattttctcgccaagaataatttcagccaacagcgcggtacgcaggggaatatcgtcgataataatgtgttcgtggcgagcatggatcccctgcccagtggcacccagcccgtcgagagtggcaatgcccagcgccgaggtaaaattaccgtcgctgccgccgcccaccgatttcccctcaagcctgacaccaaggcgttttgccgcctgctgtgcctgatggaacagcgccagattctgcggcgttggctccattggcggacgcgatatgccgccgctcacggtcacttcggcaccggccaaatgcggtttgcaggccttgatggcagcctcaacgcgcgccgcttcgccggtgttggtcacgcgcaggtcaacgccgagcacggcttcgtcggcaaccacattgattttactgccgcctttagccacccccacgttgaccgtggtgcccgcctcgggcgcattcaagccgtggagataaaggatttgatgcgccatctcctgcaccgcactgatcccctcttcgggattatttccggcatgcgcggcgctgccggtaatacgaacctcaaaacgcccggaccctttgcggccaatcttcgcctcatgggtattgaccacggcgggttcggcaaccagcacgcgtgatgacccgatggccgattgttcaatccagcgccgagaactcgggctacctagctcttcgtcagacggacagataaatcgaatactgtgctgcgccaaaccgccgttatgcatcagtgcacgcaccgcccagattgactgaatcaggcccgctttcatatccagcacgccagggccgaacagcttgccgtctttttcgagcatcgggatttcatcaatgtcccatacggtatcgaaatgcccaagaatgctggtgacctgcgggccatcgcccacgcagaacagcaaatggtcgcccagcgtctgctgctggcaaacctgcgccgttacgccaagtctttcaaaaacaatgcgctgcaacgtttcgccacagaggtcggtggcctctttattcaacgaaggcgactgcgcctgaacaaggcgtttgatgtcgttgaagataagcgtcgcgttctgctgtagataatcgtaagcggtttgcataagggttcctggtgttggaggtctgtttacgcgctttttttgattatcaccaaccactctgctgatataaatatcgtttcaatgcagatattgttgacctgtaggcaacaatgggcgtgcaagagagggacgagatgtttcacgaaaaacagattagctatctgtacgaggtcggcattcagggcgggatccgtcgtgctgcggatattctggggtcaatgcctcggtgatcagtcggcagatttcactgctcgaacgtaccctgcaactgccgctgctcgaacgcaaaggccgcacggtggtgctgaccgaagccggtaaactgctggcggacgacttcttcgaaagccgcgagcggcggactaaactcgaacgtcatctaaaagatctgcgctatatgaaaggcggggcgattaccctgcgcgtcggcgctgggctggtcgataccttcgtcgaatacgtgctgaaaaaatttgccgcctcttatcccaacgtcttcgttgagattgtcgccgggaatatgcaggatacgctggcggctatcgttcagggcgaggccgatatggcgctggcgtttggtccgataggtaacccagagttgaagcgccacagcttcccgtggggacccatctgcgccgtcgtgaatccgcagcatccgattgccaaactggggaaagtgacgattgaggaactcagcaagcatcggcttatttcactcagcgagacctttggtttgcagcgccatatgaacgcgatgttccagagccagggctacctgttcaccccggcgtatcgctgcaacctgttctcgaccgccatgagtctgagtatttcagggatggggatctctttcatgactgcgcaggcggcgggtgagcgtattgagcacaatattctggtcgcggtaccgattgaccatcctattgccaccgaagcccagtgccatctgctgcgcaactctgaccggcgtttcagccccgcggctcatcatatgtggcaactgttgttgaacttctttcagcaaaagggggagtaaatctcccccgctctgttaatggaacgcgctcatcagcttgccaaggatgatgccgacgacgccgaagtcggcatctccgaaggtggtcgaattagacagaccgccaagcaccgacagcagaatcgctggcaggaaggagataatcagaccgttgacgaacgcaccgataatcgcgccgcgacgtccgccggtggcattgccgtaaacgcccgccgtcgcaccgcagaagaagtgcggcaccaggcctggaacgataatcaccagcccaagcatcgggaagaagaacatacagatcaggcctgcgcagaaactgctcaggaagccgataatgacggcgttaggggcaaacgggaataccgtcgggcagtccagcgccggtttggcgtctttcacgactttatcggcaatccccttgaacgcaggaacaatttcggcaatgaccattcgcacaccggccagaatgatatacacgcctgccgcaaaggtaatggcctgaataattgcgaagataatatagttctgcccaccgcttacctgtgtctcggtaaactctttaccggcaatcagcaccagcacgataaacagaatggtcatggtcagcgcgatggcaatcgacgagtcatgcagaaacttgaggtgtttcggtaccttgaactcttcggtggaacggctgcctttgccgatcagcttccctaccagcgcggcacacagatagccggttgagccaaaatgccccagcgcgaaatcatcgctgccggtgattttacgggtgaagggttgcaggatagccggtgaaatcaccatcagcgcgccgagaattaacgcgccggtcaataccagcgggaatccactcaagcctccagtggcgagaatgaccgccagcatggccgccatgtagagcgtatggtggccggtcaggaagatatatttcagcggcgtaatacgcgcaaagacgatattgaacagcatgcccaagatcatgatcattgccgttgaggtaccaaagttcttttgcgcgatagcagaaaccacgtcgttattaggcaccacgccctgaatattaaaggagtgaacgaacagttcgctaaagctggttaaggtcgtggcaatcacgcccgcaccggcaatcagaatcaagaaccccatgatcgttttcagggtaccggaaatcgtatcggagaaagatttcttctgtaatagcaggccgattaatgaaaacaggccgacgagaatagcgggagtccctagtacatcattaataataaacgtgagcataaactactccagataatcggaatatgttcctccgcgctttcaggcgcacaaacgcactggccgccgaatggcagcctgaaagagagaggcttatcgttataaatcgttataggttattggcgagaatttctttaatttttgcattatccagcaggttatttaacccaaagaccttgcggttaccgtcgtcaagattggcaataatttcgctggagccaatataaatatctgccgcctctgacttggccgaactcaggtcggtgtggctgacttccgcctctttacccagctctttaatgatttttttaacgttcatttcgacaataaagctgctgcctaaaccgttaccacagacaatgaggatctttttcatatcacaccttcgattagtatttttggataagagcattcagcgccggataggtatcggccttgatcaacgcctggaagtcgtcttcatcactaaacaactcagccagatgtgaaatcatctcgaggtgctcctcgccgttgatggcgcaaagcatcacaatcacgtaaaccgggtcattttcctgggcatcaaagttcacgccctgcttgacgtaaagcattgaaaggccaggagttatcacgccctcttccgggcgcgcatgcggcatcgccagacctggggcaatcacgtaatacgggcccaactgctggtgggaggcaaaaatcgcgtcgacgtaggcaggtgaaatcgcgccggcgctaagcaacggggctgcggagaggcgaatcgccgcacgccagtcctcgactcgctccacgatgtttattctgtctgacgttaaccacttggcgagcatgggaacctcgatgaaataatgttttcaggagtataggggaagcgatgcgctattttctgtgatgaaaatcgcaaaacctgttagcgctaacacgaagactgataacatcatgttaacgctaacaattctaggggctatcgactataatcgccggcaggcgtacaaaggttgcaggcccgcaggccaccatcgcgcaacggacgacaggggaagaaatgaaggcaaaacaacggcggaactcaggtaagagtactctggccgacgtcgcgaaaatgaccggcgtcagcacgatgaccgtgtctcgtgtgcttagagaaccggaaaaagtttcccctcaggttcgtgagaaaatagaggccgcgataagcgagctgggctatgtgccgaatctggcggcgagcaatctggcgtcatccacctcgcggctggtcaccatggtggtaccttcgatgagtacgccgggctgcgccgagttttccgaggcgctgtatcaggtattaaagcccaaaggctataacgtgatcctggctgaggatcactacacggcggccgacgaatccaaacttatcgagatgatgctgtcgtataacccggcggcgatggtgatgtacgatttcgactgtagcgaggagagcaacaatctgctgctcaaatccaccattccggttgtgcaggtcggcgccacccttgctacaccgataggcatcaatatcggcaccaactacggactggccatcaagcagctgattaacgcactggcactaaagggttacaggaacattgccctgctgtgcgctgcgcatgaacaccacatagtgcagcagattctgagcggctggcactcgtccattctgtcgttgaaccagtccccgcaccgggtagtcagctcctcgctgccacccaccgtgcaaacgggccaacgtctgctgcccgatattttgctcaactggcccgaactggacctgctgatttgcacctccgacgagctggcaagcggggccattgccgcttgccacaaaaaaggcatctcggtaccggcacagctggccattgccggtctgggcgacggcgatattgcgcaaatctgttcgccctcgctgaccaccgttgccatcccctatcggccgatgggcacccagaccggcaagcatattcttgccgcgctacagggtgatgacgtcgaagaaagcgtgatgctgccgtcaacgctaatgctcagaggcagcacggcggtgcactagggtcgattatttcccgtggtgccttttatcgccgcgctcaggccgcacgcgccgggtatcctcgccttggtacagccagtcgatagcggctggcagaggtcaccacgggatccgtaatctgctgctcgaaacttgtgtgtcacctctcaaatccgcattcgaatccacacaaaaataaaacactgttttataaatttagaattaggtcaggcttctctttgtgattttgccactttctcacgaaaggttgccaaatcgcgaaggttaaagcgcctgactcgctctactttcaatgctaatccgcctgagttgtccggaaaacatcgtgacgcccgatttcgaccgccttgcgcggcgcgtacggcgttcacgtttagctgtcacgttcagggagttttaccatgacctctcgcaagattggattagccaattacctcgcctacggcgcaggcgattttctcggcgctggcaccacggccctcaccgccgcctggttgctgtacttttacaccaccttctgcaggctgacgccgatagaagcgacgttcatttttgctcttgcccgcgtgctcgacgccgttataagcccgctgatgggattcctgaccgacaacttcggctcaactcgcctgggcaagcgctttggtcgtcgtaagttctttattctgctcgggattccatgcgtgtttagctacagcctaatgtgggtaggagagatgagctatctctactatctgttgacttacctactgtttgacatcgtctacaccatgattctggtgccctacgagacgcttgtgccggagatgaccgacgattttaagaagaagaccaagttctcgggcgcacgcatcgcgctggcgcagctgtcggcgattctggccgccttcctgccgggggtgctgcttggcatcttcggcaaagataatgcggtgtcgttcttttacgccagcctggtattttccattatctgcgcggtggtcctgacgctggtatggtgctttacctgggagcgtgcaccgggagatttctccgaggagtcacgccgggcgctggaggagaagcaaagcctgacgctggcgcaaagcctcaaacgactcttcgtcgaactggcctccactttccggatccgtattttccgccagcatctgggcatgtacctcggcgggtacattgcacaggatatgtttaacgcggtgttcacctggtacgtggtgtttgtccttatgcagagtgcacagattgcctcggacctcatgggcaccatggcaattttgcaatttatcgcggtgatggcgatgattccgctgtgtatccgcatcgggcctgcgccatcgtatcgtctggtggtggtgctgtttgccgttagcgcgctgtcttatgccgggttgtggtatgccggaatgagcgacagcatgtcgctgctgttgctgatttcggcgttagcagggcttggccgcggtggcatcaactatgtgccgtggaatatttacacctacatcgccgacgttgacgaagcggtcaccggccagcgccgcgaggggatctttgccggtatcatgaccctgacccgtaaggcatcgcaggcaggcgcagtcatgttggtcggtattgtgctgcatctttccggcttcatctcaggtaaagcggtgcagagcgaaacggtcacccataccatcctgtttattctgagtgcgggcaccgtctgcacgctggcggtgggattcattatctcgctgcgttttaaactcaatctgcatacccatcgaatcctgcgcgaggagacgctgaaaatgcgccttgccgacagtatcgttcccgaacagaccaccccacaggcgcgagctacggtcgaggcactgaccgggatgccctatgaaaacctgtggggaacaacaacatcggtttccttaatcgtaatagaacccctgcgtcaacgctgaagactacacagcccggcatggcgcccctgactaacccggtaaaaagataggactcactatgtcagcacagcaaacaagcccggtattcccggtaaaacacagtgccctgctccgccagcctgaattcctgctgccgcgagaggagttgaaccagctgatcggcaagctcggcgacaatctggtgaacatctgcgatgagcgtggtgaattcctgctgcggctcgacgatggccgcgtgatcgacaccaaaggctgggccggatgggaatggacgcacggtatcggcctgtacggcatgtatcagtactatcagcaaaccggagacaagaagacgctggcgattatcgacgactggttcgcggcacgtctggcagaaggtacgccgactaaaaatgtcaataccgtctgcccgctgctgacgctcgcttaccggtatgaagaaacgcgcaatgcgacgctgctgccggtgctggaacgctgggctgactgggtgatgtatgaaatgccgcgtaccctctgcaatggtttgcagcacatcgtttacaataacgagaaccaccagcagctgtgggacgacacgctgatgatgagcgtgctgccgctgttaaaaattggcaaggtgctgaatcgagaggattatatcgaagaggccagctaccagtttctgctccacgtgcagtacctgatggacagaaaaagcggcctgtggttccacggctggacctttgacggccagcataactacgcggaggcgcgctgggcacggggtaacagctggctgactatcgccatcccggagtttatcgagctcatggggtggccggaacagcacgcgacgcggcggtttctgttgcaggttctggaaactcaggtgaaagccctgcaacagtatcagcatgaaagcggactgtggcacacgctgattgatgacaaaaactcttatcttgaggcttccgccagtgccgggttcgcctacggcatcatgaagggagtacgtaagcgctacctgccgcgcgaaatgctgccgatggccgaaaacgcgctgcgtgcggtgatacgccatatcaatgggcaaggggaactgactcaggtttcgtttggtaccgcgatgggcaaggatttggattactaccggcagattcctttaacctcaatgccttatggacaggcgatggcgctgctttgtttgaccgaatatttgaggggttacctgtaaagcgggcataaaaaagccgtctcactctgcgtgagacggctgtatagattttatcgcttaaaggcccagtgcgttaaaatccgacgcatcgtggcgttcagccagttgcttatcccccaggtgcggttgacgatacgtccacgcgcgacagcagttcgtgcggcaatttcgtcagtccagcggataaggtgggtgtaggacttggcgtcgatgaattctgccgcttcatacagcaggcctttcaccagcgcgccataccatggccagatagcgatatcggcgatggtgtattcgtcaccggcgataaagcgatgtttagccagctgtttgtccagcaggtcgaggtgacgcttggcttccatagtgaaacggttgatagcgtattcgattttcaccggcgcatagtgataaaagtgaccaaaaccgccacccacgtaaggcgcagaaccctgcagccagaacagccagttcaacgcttcggtacgtgccgcgaagtcttttggcaggaaatagccaaacttgtctgccagatacagcaggatagcgccggattcaaatacgcggacaggatcggcaccggagacgtccagcagcgctgggatcttcgagttgggattcacatccacaaaaccggaggagaactgatcgccctcgttgatgcggatcaggtgcgcatcatattccgcccgctcacgcccagcgccagcagctcttccagcagaatggtcaccttctggccattaggtgtgccaagagaataaagctgaagcggatgcttgccgaccggcagcgttttctcatgcgtcgcgcctgcgattgggcgattcagcttgccccatgctcccccagttcgttgtcgagagtccagaccttaggggttggtaattgttgtccattgcactacctcagttttattgaatttctgttttaatcgtcgggctaggttttaacagattgaaattattgcagccattcagtgtagatcaggccgagtaacggccgatactcaggctgtgctgtccgctagagaatgacgtcatagtgctgacgactcacctcactgaatccgccgatcagcgccgcacgacaaacctgacgatagcggggatcggtgaccagccttttcagcgcagatcgcagctgacaaagctgattctcggtcgtttcgggaccggtaatgagcggcaggcccggcgtcaggggcgtttcaccaatgatttttagctgcgcaagcgcctgcggctgatgcttttgcagcagcgcgtaggtgacacaatcgatggcggcaatatcagcgtcaccctgctgtagcgcaagcagtgactgacgatgactgccgctgaagataacctcgctaaagaacggaccctgacctccaagcggcgcgaccattttgcgcagggcgttatagcccgactgggaatctttgctgttggccaccgcgatacgctggcggaaatcaggcagtgaaccgcccatgtccttttgtcgcgtcaacagaaagctgcgatagcctacgccctcgcagcctgcggcaacgtagtgaaaacagccgaccggctgaacgttttcgagccgcgtcaccagcggataaccacaggtttggcttagcaacaagcgcggctgctcccagtgctgaattaaatcttcaggccagtttaggtcgaggttgtctgcatcaaatccctgctctgataacaatgcgcgtagcgccgaccacagtgcggtaacatcaggctgattgacagcgtacatcggtaatgaaacagcgttattggtgctcatcgcttacctcatccagagtagcccccccggatgaacgttaacgtcaacggagcggaatagaaatcgacgcagccattccctatatccaccaatcaggaatccctgattgagatgcagataaccctcgcgatactgcaaatatatttttcgcagaccataccagggaacgcccggaagattgtggtgtacagagtgataattcagattaagaaaaagcacccgccagatcaaggcggcttcattaatcgccgatcttgcctgaggatcttccgccgcacgatgttccagaaaggatcggatcttggtcaggctcagcgccggataactcacgacaatcagaaaatataagattgaaaaatcaagccgatgcatccatgaaaacactgccgctaacagtgcaccgtgcagaagccacatgacgatggccttgatattagcggagcgaaatgacaaaagcattgcgccgacagtttgtaaaatatcgatagcaggtccgagaataacgcgtccggggaaagtatttcgaatactgattatcctacgctgccaggggctaaatctttgccagcgagccggagagaaataataggtctcgggatcctcctccgggcaggtgagatgctggtcgcggtgatgctgtaaatgcgaatcgcgatacaggccgaacggataccacacggcgagcggcatcagcccgagaagctggttaaaaaagggtgagcgcgtggggtgtccgtggatgagttcatgctgtagcgacatataccaggtggtaaaccaaatcagcagcagcgtggcggggaaaagtcccagcgtctgccaataggccagcgtggtgaaccatccgccatatataatgaccaccagaccccaggtcggtagctcgctgcgccatagccatgagcgtgaaagttgaccaatatattctctctgctgttggtgcaaataattagcaccctttttaccactcaccgtctctattacccgcacgtgaatcaaaagctaaaaatgcggtttttacccccaactcacaacgtatttaaaacgcattgcttatgcgggggatagatatctcatagaagagaaaaatcctgttttttgccctttaggttacaaacgctaaacttcgctctatagttcgatgacaataatagagtttcaggggaaacaaatgagattaaacggtatttccaagggatttttcatcctgattcttttcatcgtcacatgggcgtttctggatgtacttcggccatactactcgtcggtcttatgggcggctattctggctattattttccatccgttaaaaaccaagtttcgcggatggctgggggataaaaacgggattgccgcgttgcttaccttgttggttatctgcctgatcgtattcacaccgttggctattatcgcctcatcactggcgattgaatttaacgtggtgtacgacaagctacagcacaataatacgcagttgccgacgattattgctgacgttatccaacacctgccggtctgggcgcaacatcagctggccgaatacaatctcgacagtgcggctggcattcagcagaagctttccggctttgcgcttaagggaagtcagtatctggcaggtagcgtcttcctcatcggtaaagggacctttagctttgtggttggcttcggcatcatgctttacctgctgttcttcctgctgaaggacggcgcttatctggtcaacctgatcctcgaagcgctgccgctgtccaaacacgttaaacaccacctgtttatgaagttcgcggcggtgtctcgcgctaccgtgaaaggcaccgtcatcgtcgctattgtacagggtgcgctgggcggcgtggcgttctggattaccgggattgagggtgtgctgctgtggggcgcgctgatggctttcttgtcccttattccagcggtaggttcagccattatctgggttcccgcggccatttacttctttgcgtcgaaccagctgtggcagggtatcttcctggtggtgttcttcgtggtgatcatcggcctggtggataacattcttcgtccgctgctggtcggtaaagataccaaaatgcctgactatctaattcttattgccacgctgggtggcatggaagtctacggtattaacggtttcgtgattggtccattgatcgccgcgctgtttatcgcctgctggaatattctttcaggtcgcgataacagggaaaacatcgaagagattgatgaagactttatcgaagacggcaaggcaccgcctgagaattaatcgttttatgttgtgattaaaagggtggctttgccgcccttttttattgcctgttaacggctggcggtcggacactgcggcaaacgcgttgggttgccgggaatacattgattcggaccctgcggctgttcgccaggctgacgcggctgggtgggttgcgtaggctgcgtcggctgagtgggttggtttggctgtcccggaagaacgggaagcggcagctgagcacgaggttccaggtgtttcggctggctcgccagggtgctcgcggataacgtcagcagtgacgacaacagcagcgttgccaatagagttttcataacgcctcaataagaaattatcagtaaagcctgagaaccagtatagttcccctgcgctttgcccgacacttgccaggtgcaataccttccctttttcggaacgcgacccaggctctgccttctagatgagtcataagctgttgccctcgaattcgcggcatcccattgaatgtctatacttatcttatggttaataacatcatttgggagaagtcatgacagagcataaacagaaatcactgacccgcggcattaatcacgtcgggcttaccgtcccggaccttgagcaggcaaccacatttctgaaacaggctctgggcgcaaagttcgtttataacggcctgacgagcgaggatgaaccgaggaaaggggcagacacggagcggcagcttggcctttcttccggtaccgtggtcataaaacaacggcttttacgcatcggtaacggcgctaatctggagctgttcgagatagtcagtgacagccaacaacggcccgttggtctacaggatataggctggaaccacctttctttttacgtagatgatatcgaccacaccctgaaacaggttatagccgcaggcgggaaaccgctgtcagagccgcatggaaactcacgtcacgaagacactcaagacaacggcagcgtctacttcaccaccccttggggcagcctgatagagcttcaatcgatacccaatggctactactatcccgatgatagcgaggccgaaacctgggtacctaaaatttaattcatcaatccgtttcgcccttctccacgccggcaagaagggctttaataatgagaatgctaattaaaatcgaatatttaatcattccaagtgaatttattgtcgaaactgccattttgtaaaccttaccagacctggcgcaatccaatctttacacatcatccgcataaaattcatggcattaactgtgcaatttatcatcacgtgtgtatactacgcgccggatgttgacagacatcctatggaattttgattacttgctccacttaccatggctcgccatcccgcgagctttttttttgcctgtcatccgcatctgtcgcccactttttagagttttagccctaaaatatgcaacttgctacgttgcgtggctgaaatgaacatttcttccttaatatgttgcattcccatcgaagcataaaaacggcgagcgcctacgttttgttccaggacttgcagccaaagaagcggctgtccgcgtgccttggccatcaatgcaacctcttccaccatgattctgccgtagccttttcccgtttcatccggctcaatatatagcttgttgagcagcgttcccgtcaacgcggggtccgaaatagggctctgccaggtcagcttcgcgatgcccacagggcggtcggtttcagcaatgagccagcacacgtcagagtccgttagactcttctcaagcacaggcagtgaatattcattctcgagaaactctgccagctccgatttcgactcccaaagatcttcaaagggataagtcgaataaccaagttgattaatcaacggggcatcattcagcagtgcgatacgtaaagagaggggcatggaagagttccgagacaaagaagaagttcatctcagaataaaacacaaacgggaaacgtcaagtcactgcctaataagcagttttgagcatttcccgtgagagagtggcaaatattgccgtctataacttcagacgcttaatcattacttgctggcgtagccttcggtagagagggtcagagtgacatcatcgcctacgtaaggaacgtatttgtccactttgaagtctgaacgcttgatatcagccgtggcatcaaagccgatcgcctgcttcttaaccattggatgcaagccctgcttggtcagcgtagcgtgcagagtcactggcttggtgatgcccttgatggtcagattaccttcaacatcaaatttattgtcgcctttagcgataactttggtgctgtggaatacggctgaaggatatttagcagtgttgaaatagtctgggcccaggaactctttagtcagcgcaggaacatgagtatcgatctgagacactggcagagtcacatcaacgcgtgatttctcaggatgatctttatcgaatactaccgtgcccttggtgttagggatatcagcagtcgggtgagaaaaaccaaagtgattccaggttacgataacagaagtatggtctgggtcgagagaataatgcatggcctcagcctgagacagaggagcatacaggctagctgcagctaacagtggaagtgccatctttttgaaattcatcacacggatatccttttaataaatcgaacaacagtaataagagtgtggttcattaagacaaattggcataacgaaaagttttgtctttacccttcaaattaattgagcaatacccgtgagtgattatcacgctggcgctttatactaataagaatatccgtcattaaattacgtcgcttttatagcagggcgaaagagaaaaatggctggaataaataccaatttgcactactgttcatttatcaggatggttagcaggcgaagctgctggtaggatctatagttattcctattagctataatgacgaatatctaaacaaaatgatggatggaaagaaccccatggattgggaatgcaaagtcaccgtgcgccagagtccactaagacgcatactgcgatcgcgcggcctgatggtcgttggcgccctcttcactctggtgctgctgactcacggtacgcttaatgtactttgctggctgagctgccacgtggtctttaaggcttaacgtatcccgttgtcatacaatacctttaaattaatttaaaaaactcccacctcagtttgctttgttttaaaataacgaagcagactagtaatcacatttattttctattcatttttattccatttaattaattgtgtcattttcaaaaaacgctcttatacccccttcgctcacaaacagcttgattaaaaacaccgttactcataacaatggaaagcataaaataaacatctaaaaggaaatattaactcaaaaaaaatcattttattaaaaagtcaatttttaaaaaaccattaacacaatgattcattccactcccttatttctttaaaaaaacaattaaatcacatcccatatctctataggaattaatatgattgaaggaatcgctggaggatcgcctatcattacgcatcctgaaacagtgcaaaaaaatacgcagactctgacaacgagtaacacatcaaatagcccttctagttttgttgaagcaggcaatactttaccgctaattaaacctcctcttagcgaatcagaacaaaaactaattagtcatcatcagaatatagatttggattatacattcgacttcgccggattagaaagtaatacgataaaccttcccgtgtcggcactcagaactgcatactcaaaaattatccttgataactatctgaaagactcatccaccataatgtcagacgatatcagtaagaactggagcgataaagggctttgccaacatgatatctcccccgacgccctaaaaagccttttgatcgaaacaataaggaaatcagagtacgaaaacgtcgtcggtcaaaccttactggtggtgcatgaaaatagcgagccagcggtgaaatcccagttagataaacttgcaaaagacatgcaatcgaaaggtttataccttatagaagatcaaggtctgcaaaacgaaaatgtagaaaatagccttgatactttcaacgcattgcttaattcagcacaaattaaaacagccaaagatcgtcctatccaggagatactcgcccaacgttcactgaggctcacgaccgaagaacaggatgagagtagggttcaagaacatctcaagatattatgcctcgaacaagctcccgacctgcacgtaaaagaggcgttagctaaaattaatggtaatatcattccactcaaagagctgtcggaaatacagtctaatgtcagaaaaacggttgctggtgtagaccaaaatcttgctgaaatgataaatattggtgacatttctaaattcccggcactgtttgatattaacgtttataatagaaaatggctgacatcgttcccacctcaagaaatcaaacccaatgaattcaccctgaataatggcgacgtcatcaaaccagattttatcttcgatacgcgcactgtgaagtattattccaccgaaatgcaggataatactcaaaatgtagaagcgttcgagttagccataaaaggagggacgcgggggattttcatcggtccattaacgaaagaactcagcaccgatgatagagggaaaataaaacagctcattcataatattattaccggccaattagaacccactgagatagagtgtcgcgtcgggctaccgaagacaaatattgtggttgaaaataaaaatttgcgtcactgggagaaagaacacgggctgggtgggagtctgctggacactgaagtattcaagagtataacgagcctgaatatagatgaagaaggaagtaaagctataaacgttttctcacggtatgcatctttgtgtagtaggcctaagcctaagcagcttgtgatggataaacccttcatggcggtgtatgccaataaagacaacgtcgaactggtttatatggtgaataatccgcagatttaataatagaatcaaggccggtgacccggccttgaatttgaacattagtcagtgactttgttcttaagggtttcagccccttgcttggtcttatcccacgttttttcagtaccttgtttggtactgtgccaggctttttgagtgccttcagacactttgctacctgtactacccgccttcccttcagctgcgtgcttggacttcagcttcaactctgcccctttgtcctgggcatggtgaagtttttccttagcggtgtctgcacccttttctgcctgcgctactgtatcgtcggtcgcgtgagtcattgttgtggtatcagcgaatacaggagatgccaaaagaagtgcggataaggctaaaattgtctttttcatgattccctcatttatcagctatgtttggtacacccatgtaggatggcacaaatctagcatttagcgatttaagaataggctggaaaaaataacgggctcgataaaacaaccctaacctactgatttaaaaatgttaaatgacaaaaatcatcaggtaagttcttcaaaacattaatcgatttcgttagaacatagctgattttggtcataaagcgcccaggctgacaacttgtttttattgggtttttcaggatgattacggaaggtctgggaagtgcttctggagcgggtgaagggaatcgaaccctcgtatgcagcttgggaagctaccgttctaccattgaactacacccgcttcggtgtgtgtctggcattatagcgggttgaggcggggtagcaaggaatgcttcccaataagcgtctaatatttaggcatttagcgcatttaatagaaagggggcgctctgcgtaacagaccgccccctttttaatcacacgaattattgaatcggtgtcagcatctcaatattcatgttacctaactgctttttatcggtaatcacgttcttatcttcgcggatctttttaacatcatcggcggtgaccttatccccagcggtattgccccagctggtgcgaataaagttcaccacgtcggcaacctgttggttattcagacgccagccgaatgccggcatggtgatgttagaaggtgcgccgataacgcccggcaaggtattaccggtcagcacgatgtgaatcagtgaggttggatctttcgccaacaccaccggattccctttcagctctgggaagaagcgcttatagcctgtaccgtcagtcttatgacatgccgcgcagctgtcgacgtaaacggcggcacccggtttgctgtcatcgcctttccacagcgctttcgctacgctgtcgtcggttttaaacgccggttggctactgtcttttacatccagcgacttgaggtatttagcgattgcggttgcgtcttccggcgtcaggtattgcaggctgtgcttaacaacgtcggtcatcccgccgaacacggcggtgtgatcgttacgaccggtgcgcaggaactgaacgagatcgtcctcgctccagcggcctaaaccatcacgatcatcgccacgcagattgctggcggtccagccatcgataggcgctgcgctgcccgacaggaaggcgttgccttcgtcgttgttcatcgctttttcctgcatggtgatgctgcgcggagtatggcatgcgccgcagtgacccaggccttcaaccagatagcggccacgcgccaactggggatcttcattcattttaccggcaaacggctgcaccttaggggcaaacgcggtacgccagatagccagcggccatctcatcgacagcggccacggaatgtcgctgtcacgatttggctgtgccacaggctgaacgccgtgcataaagtatgcgtacagcgccttcatatcctcatcgcttaccaccgcgtaggacgggaacggcatcgccggatagagcgtctgaccgtttttcgccacgcctttgcgcactgcattctcgaaatcttcgagcgtgtagtcaccaataccgttggctttatccggcgtgatgttggtggagtaaatcgcgccgatcggcgtcaccatcttcaggccaccggcaaacggctggccgccttcggtagtatgacaggcgacgcagtcaccggctttcgccagatattcaccgcgtttgatgaggtcggaaccactcgtatcatcggccagcgcagcaaaggctaccgagcccaggaacaaggcagaaagtaattttttcatcgctatttccttatgcctgtaccaatgggcctgggtttttcagataggtctcgcgaatcgctttggcagaccagtaggttaacgcagcgaccataccggtcgggttgtagcccagaccttgcgggaatgcggatgcgcccggtacgaagacgttgtgcacgtcccagctttgcaggtaacggttgattgcactggtttttgggtcttcacccataatcgcgccgccgttcatgtgcgtggtctgataaacggtagtgtcgaaatgcgaattggcattttttggcgcgccggtgatcagtttcgggttcatcgctacggcgattttgtgcatcttgtcgtacatgaactgcgacatcttcacgtcgttatcctgccagtcaaaggtcatacgcagcagaggctggccgtacacgtctttgtaggtcggatcgaggtcaagatagttcgcgcggtaagactgatgcgcaccgtgagcatccatcgacacgttatgggtgtaagcgtcagccactgcggccttccacttgctgccccagtttggcgtgcccggaggcgttggcagacctgaaataggcttggaaccggcctggttaacccagaacggcgagccgccgacgaagccgtatttggcgtggtcgaagttgtcggcgttaaaatcatcaacgcctacacccgcaccaccggcaccgatgaaggtgttggtgaacttgtcggtatcgaagaaggttttgatggtagtcaggttctgataggcaaagttacggcctaccacgccttcattagtcaccgggtcgtacggcttgccgatgccggaaagcagcatcaggtgcacgttgtggaactggaaggcagagagaataaccaggtccgccggttgctcaacctgttgacccagcgcgtcaacgtaggtcacgccggtcgcacgttttttgtcatcggtcagattaacgcgcagtacgtaagcgttattgcgaagttcaaacttcgactcctgacgcagagacggcaggatattaacgttcggcgatgccttggaatacatgtagcaggcgtaaccactgcaataaccgcagaagttgcacgggcccatctgcgcgccgtaggtattggtgtacggaccagaggtgttggcagaaggcaggtcgtaagggtgataccccacggactccgccgcctgagcaaacagctgggcagaataggtacgtttttgcgccggaagcggaaatttatcggagcggtcaggcgcaaacgggttacctttcccttgcgcgccaggttgctgctgacctttgatagtccagggtgagcctgaggtcccaaagactttctcggccttgtcgaagaatggctctaactcgttatagttaaccccgaaatcctgaatggtcatgccttctggaataaacttcttaccatatcgttcttcatagtggctgcgcatattcagctcgataggatcgacgcggaaatgcaccccagaccagtgcagacctgcaccgcctgtaccggtcccaggcaggaacgcgtttagctggcgataaggcatcgcggtttgcgtcatgttatgacgaatagtcacggtgctttttgacaggtcctggaacagctttttacgaatgttgtaggtcagctcatcgacaacctgcgggtaggcaccgtctggataggtgtcgcggcttggaccacgttcaagcgcaaccacgctcaaacccgcttcggtcagttctttggccataatggagccagcccaaccaaaaccgacgatcactgcatcaactttattcattgttttagacatacttacgctctttcaccactgatagacaccggcgggaacggataacgttcgccgcgttcaacccagtccataaagtcggcacgggcaccggggaaaccgataagcttccagccaaccatctggtgattgccaccgtggattgggtcgctgaagaagccttcgcgggtgttttgcagcaggaaggagaagaatgtcttgctcggaacctgtttgaactcggctttgccgctctcaaattccatcagcagggattcttgctgatctgtcgtcagctcactgaataccttaccgaattttgctttggcgtagtcgttggcgtcgctgattcccaattgataaatggcaaaaggtcctagcggaagctgataaccgaagtcgtgctcggcttcagggtggaatggccctgcatgtaccagttggcaccggtagcgtaaggcgtgtccatctggcggtcgatgaactctggcacgccggcttccagcgcacccggaccacgatcgtcagcggggatcaaacgcgcgacggcagcctgcaggaacgcatactcttcggcggtaaatttagtgggatgataatcaggtgccttaacggcagatgacgcctcagacggtttctgttcgcttgcctgagcaggcgtggtcattgcgatgaaaccggttccatttaaagccacggcaggtgcgattgcgatggttttgagaaggaagtctctacgggagtttccagaatttttcagcgacatagcaggtgttgttataaccagaatgttgggggtttgttatacgcctattacagacgttataagttgttaatttcttcctcgcatataaggaagaatatgtaaaaattttaccacaatgttaatgagtgtaattggctattggtgccaataaatgtttctacttgtaaaattacagttaatgaattgagcagtattgaaatatttttgggtgttttttaatcaggtatttggagcatcgagaaagaggcttaagagttaatcagagggataggcgggataacgaggtgctaaaaagctccctccccttgcagaggagggaagcgttcggttatttctgtgggcgcatggctgggaacagaataacgtcgcggatggtgtggctgttggtgaacagcataaccatacggtcgataccgatgccgaggccggcagttggcggcataccgtgttccagcgcggtcacgtagtcttcgtcgtagaacatcgcttcgtcatcgccggcgtctttcgcagtaacctggtcagcaaagcgctgcgcctggtcttctgcgtcattcagctcggagaagccgttaccgatttcacgtccaccgatgaagaactcgaagcggtcggtcacttctgggttttcgtcgttacggcgtgccagcggagaaacctcagccgggtattcggtgatgaaggtcggctggatcagctggctttcagcggtctcttcgaagatttcacagacaacgcggcccagaccccagctcttctcaattttgatacccagagattctgcaatagcggtcgccttggccatgtcagccaaatcttctaccttggtctctggacggtatttgaggatagcttcggtcatggtcagcttggtaaatggcttaccgaagtcgaaggtctgatcgccatactgcactacgctgctgcccagaatggtttcagtcaacgtgcggaacagggactcggtcagcacgatcaggtcacggtagtccgcgtacgccatgtagagttccatcatggtgaactctgggttgtgacgcggagaaacgccttcgttacggaagttacggttgatctcgaatacgcggtcgaaaccacccacaaccagacgcttcaggtacagctctggtgcgatacgcaggtacatgtcgatgtccagcgcattgtggtgggtgatgaacggacgcgcagacgcaccgccaggaataacctgcatcatcggcgtttctacttccataaagtcctgctcaaccatgaacttgcgaataccagccatgatttgtgaacggattttgaaagtattgcgcgactcgtcgttagcgatcaggtcgaggtaacgctgacgataacgggtttcctgatcggccaggccgtggaacttgtctggcaacggacgcagtgctttagtcagcagacgcagttcggtaacgtggatagacagttcgccggtcttggttttgaacagcttgccgcgagcgccgaggatgtcgcccaggtcccacttcttgaactcttcgttgtactgaccttcttgcaggtcgtcacgcgcaacgtacagctgaatgcggccgcccacgtcctgcagggtcacgaatgaagctttacccataatacgacgggtcatcatacggccacccacggtgacttcgacgtttaacgcttccagctcttcgttttctttatcgccgtaggcggcgtgcagtgcatcggaaacgctatcacgacggaaatcgttcgggaaagcgatgcctttctcacgcaaaagggccagcttctcacgacgcgctttcagctcgttgttaagttcctgcgcgctttctgcgccctgtggctgctgcccagatggttgttgctcagacatttcggttccttataacccggctttcaaactggcttcgatgaatttatccaggtcgccatctaatacggcctgtgtattgcgtgtttcaacgcctgtgcgcaaatctttaatacgggagtcatccagaacgtatgaacggatctggctgccccaaccgatatcagacttgttgtcttcagcttgttgtttatcagcatttttcttttgcatctcaaactcataaagcttcgctttcagctgcttcatggcctgatccttgttcttatgctgtgaacggtcgttctgacactgcaccacgatgttggttggcatgtgggtaatacgtaccgcagattcggttttgttgacgtgctgaccaccggcaccggaggcgcggtaaacgtcgatacgcaaatctgcagggttgatttcgatgtcaatatcgtcgtcaacttctgggtaaacgaataccgaactgaatgaagtgtggcgacggccaccggagtcaaacgggctcttgcgcaccaggcggtgaacgccggtttcagtacgcagccagccgtaggcatagtcaccgatgattttgatggtggcagacttggtgcccgcgacgtcgccgtcggactcttcaatgatttcggttttgaagcctttggcatcagcccagcgcaggaacatacgcagcagcatgctggcccagtcctgagcctcggtgccgcccgagcctgcctgaatgtcaaggtagcagtcggcgctgtcatattcgccggagaacatgcggcggaattcaagctggtccagcttgcccatcagcacgtcgagttcggctacggcttcgttgaaagtctcttcatcgtcggcttcaaccgccagttcaagcagaccggtaacgtcttcacgcccctgggtcagctgatcgatggtatcaacaatggcttccagcgccgagcgctctttacccagcgcctgcgcgcgctcaggttcattccaaacgtccggctgttccagctcggcgttaacttcttctaggcgttctttcttggcatcatagtcaaagataccccctaagaaccgcggccctgtcggccaagtcctgaatgcggttttttaccggattaatttcaaacatgattttttttcgcgtcttacgttaggtcgggtatggcacagcgccattcgaaccgcatattctaaaggaaatagcggtcggtttatagcaagttggcgcattttctaacgcagaattgaggcccgcgttagcgcggccacaaatgctgaatcatcaactgaacgttacgattaccgcgatactcattgatatcgagcttataagcgagctgaacctcgcgcacgctggagtctggccacaccgtcgggtcgatgttaaacgcgatcccgtcaagcagtggcccccgccgagcggctcaatcatcaccttcaaatgtctgtcttttaaaagcttttgctgcaagatacggaaggtgccgtcgaagactggctccgggaacgcctgtccccatgggccaccgtcgcgcagcatctcagcggtttcgatggacatctgctgggcagaaagttcgccgtccgaccacaccacgccctcgaggtgtgaaggatccagccattccccaccagctcggcaaaacggtcgcggaattgatcaaacttgctctcctccagcgacaggcctgcggccatcgcgtgtccgccaaatttcatcatcaggccgggattaagcgtatcaagacgctccagggcgtcacgcatgtgcagcccgctgatagagcggccggagcctttcagcacgccgtcgcccgcgggtgcaaaggcgataaccgggcgattgaaacgctccttcagccgcgaggccagaatgccaaccacgccctgatgccactctgggtgatacatcgccagcccaaaaggcagattttcgccgctggtttcaagcttctcgcacagtgcaagcgcctcaacctgcatgccctgctcgatttcacgacgcgtcagattcagcgtatcgaggtcactggccagcgcgcgcgcctgtgccatgtcctcgctgagcagcagcgcaaccccgattgacatatcgtcgagacgcccggcggcgttgagtcgcgggcccagtgcaaaaccgagatcgctggcggtcagctgacgagcatcgcgcccggcgacctcgagaagcgcacgcacgcccggacgacacttaccggcacgaatgcggttaagcccctgataaaccaagatacgattattggtgtccagcggaacgacgtcggcgacggtaccaagcgccaccagatccaaccattcggccagattaggcatcgccagcccgcgctgctcaaaccatccgctttcacggagtttgctgcgcagcgcaagcatcagataaaaggccacgccaacgcccgccaaagatttggaggggaacgcacaaccgtgaagattcgggttaataatcgcttcggccgcaggcaacgtctcaccgggtaagtggtgatcggtgatgagaacctgaatgcccctttcgtgcgccagctcaacgcccgcgtgcgacgaaataccgttatcaaccgtgagaatcagttgagcaccgcgcgccgctgcctgctcaaccacctcagggctcaggccatagccgtcttcaaaacggttcggcaccagatatttgacgctgtcgtagcccatgctgcgcagtgacagcacggtcagcgcggtgctggttgccccatcggcatcaaaatcgccgacaatcatgacttgcaggcgttcagacaaggccgtttgcagcagattcacggcggcatcgatgccatcgagctgtttgtagtcgagtaaaccacgcacgccgcgctcaagttcttgactctctttcacaccgcgcagggcgtagaggcggcgtagcaaagggcaaggtcggcaggtaaatctgcgccctcatccccttcacgacggcgaagctgggtcttaactgtcacgaaaatcaaccacctatattttttgaacgagctgattctctctcggctcgcccgttaatgtcttatgccttgatgccaagcatagccgccatggattccggcggctgatagcctggcaccagcgtaccgtcttccagcactacagccggcgtaccggttacgcccatttgctggcccagttcaaactgtctggcgatatcgaccttgctgtctgcggttttggcaatcggcgaaaccttctcacctcgtatcgcttcgtccagcgctttcttacgatcggcagtattccagattgactgcatctgtttgcccgtttccgagtcaacgccggcgcgcgggtaagcaagataacgaacggtaatccccagatcgttatagccttttatctgctggtgcagtttatgacagtagccgcaggtaatgtcggtgaacacggttatcacgcgctgctctttagccgccttatagatgatcatctcgttttgcatcgcgttcagcttgttgaccagaggctgattgctgagattcaccgggcgctcgccgctgacgtcatagagtggaccctgcagcacatatttgccatcttcgctgacataaatcacgccctttggcgtggttaccgtttttaatcctttgacaggagaggcctttacttcaggattttcgaggccgattttgttaagggtagccttcagagaagcctcctcggcgtgcgcgacattggccagtcccgaggttaccagggtcagcaccagtagagtttttttcatcgttacgtcctttgttctcccccggttcacgcacgagggtgatgttgttgatgtagctgctttaaacgctccgttgctacatgggtgtaaatctgagtggttgacaggtcgctatgacctagaagcatctgtacgacacgcaagtctgccccgtggttcaatagatgggtagcaaaggcgtggcgtaaaacgtgaggcgagagtctgtcggcgtcaataccggcaagtacggcgtagtgtttgatacgatgccaaaacgtctggcgcgtcattttttgaccacgactgctggggaacacgatatccaatgattgtccgttaagcatccacggcctgccgtgctcgagataattttcaagccagtacaccgcttcttcacccagcggaaccagtcgttctttgtcacctttacctataactcgcaccactccctgacgcagactgatgtcgctcaacgtcaaacccacaagctcggaaacgcggaggccagtagcatacaggagctcgagcatagacttatctcttagttccagaggaatttctgtactgggcgcggcaagcagcgactcaacctgggcctcactgaggtcttttggtaagcgttgcgggagtttaggagaagaaagtagcgcggtcgggtcgtcttcgcgcagcgattcgcggttcaaatattggaaaaaacgtcgcatcgcgctcagtaaacgtgccgaactggttgccttgtacccgccttcaacgcgttcggccaaaaaggactgtagctcaaacgacttgacccgaagcaggtctgtttgactatgttcaagccaacccagcaaagacttcagatccagacgataagaagccagggtattttcggcaaggtttctctcaagccacagcgcgtcgagaaactgttcgaccaacatctggccatcgtctgatttgggcacttctactccttttatcctgcagacaggatttggcttaaggtcagggttatacccgcgcattatgccttaaacggagacaattctggtacactcaacgccattcaataatttttaccgacagtggcagcaagaatgaagattggtcttttctacggttcaagcacctgttacaccgagatggcggcggaaaaaatccgtgaaattctgggtgaagacctggtggatctgcacaatttaaaagatgtcgagccttcgcggatggaggattacgagattctgatcctcggcatcccgacctgggactttggcgaaattcaggaagactgggaagccgtctgggagcaactcgctaccctaaacctgcgtgggaaaattgttgccatgtacggaatgggcgaccagctaggttacggcgaatggttcctcgacgctctcggtatgctgtatgaccgactgctgccgctcggcgtgcagttcattggcttctggccaaccgaaggcttcgaattcaccagcccaaaaccgcttagcgccgacggcaagcattttgtcgggctggcgctcgatgaggttaatcagttcgagctaagcgaagatcgccttcagcagtggtgcgatcaaatcttgctcgaaatggatgcgctgctgtaatccgcgtccccaccgtgctctttacagcgggtggtgattattattggccggtgccgcgtcgcgcttgccggtcaataatatctgccgcagatgccgccactcctcctgactcatgctgtcagaagccagccaaagtttgtgtttcttgccgcgcagcgcctgacgccagccatggccggtgcgttcacgcctcagcgagagcagtataccgctgtctatcatccagaccggctgcttaattttccattcctgtttacgccacagcagtctgtcctgagcaagaaggctgatttcaccctggcgcgcactgatgcgccgctggctgcgtattgactgagagaccacaataattagcagtatcagccaaatcatccagtcgtcgggcggccagggagccagaagaatcagcagaataagaatgccatgcaccgccagcgaaaacagctgactgcgccatgacacccttaaatcacattgccacagggccacgttgtttgtttcgtgtctgaatcaggttaaccatgcgcttcaactcgagatcgttcggctcgccgtagttcatcagccagttaaaaaggtctgggtcgtcacattcaagcagtcgggcgaactgctgcttgtcttcatcacttagggtgtcgaactcatattcaaagaacggcaggatggcaaggtccagctctttcatgccgcgacgacaggcccagtggatgcggggtttgttgtttatatccattgtgcgggtatccatttaagcagaagcgttattttttatgatgcggagctgattctagcagcctgacgagttctggcgtaactattcagtgtaacgatgtcacaggaagttcatttttgggtaacgtgccgcaaaaaacctcgcagcatcggtaacaactaagcaatcgatgcgagacatcctctaaagagtatgaataagtgttttcaaagcggttcggctcttttaccatgcctgtatacctccctacatcagcagctttggattaggacatatcatgacgtacaagtatccgtttcctccgcaaaagccttcatcatcatcccaccttccgctgaccattatctcgctggaagactgggcgctggtaacgctgaccggagccgacacgattaagtatttgcaggggcaagtcaccaccgacgtcgaaaaactcgcgccggaacagcacgtgctttgtgcccactgtgatgctaaaggcaaaatgtggagcaacatgcgtctgtttgaacgcggcgacggcatggcgtttatcgaacgccgcaacctgcgtgacaaccagctcaccgagatgaagaagtacgcggtgttttctaaaattaccttcaccgccgacgacgacgtcgtgctgctcggcgtcgccggttttcaggctagcgcagcgctgaaaggtatttttgccacgctgccagacgccgcaacgccggtcgttcagcaagacgaaaccactctgctgtacctgtctctgccagcggaccgctatctggtggtcaccagccctgagaaggcgcagcagctgacgctagagatgggtgaacaggcgcagttgaacgacagccaacagtggctggcgctggatatcgaagccggtttcccgattattgatagtgccaacagcgtgcagttcatcccacaggccaccaacattcaggcccttgaaggcatcagcttcactaaaggctgctacgccggtcaagaaatggtggcgcgcgccaagtatcgtggcgcaaataagcgtgcgctctactggctagcaggtaaaggcagcaaagtgcccgccgccggtgatgacctcgagttacagctgggtgaaaactggcgtcgtaccggtacggtgctggcggcgattcagctcaacgacggcgcggtatgggttcaggcggtgctgaataacgatctggaagccgacagcctgctgcgcgtgcgtgatgacgcagggagcgccctgcgcattcagccgctgccttactctctggaagaagccaagtaattctggcagctccccgtgtaatagaagtcaaaaagccagcggcggccaacagggaaatccctcttgcccgccgctgtcgatgattactttacgcctgtaatctaaggcgggttatttgcatatgccgtgcatgctcgatgaaccgacctcacgccaaacggcccaggtccctcccgctccaggtaagtcgccctgcgtccaccatccattcagccattctttgccctgataagagactttcacacagggaagtttataagtggtcgaacgctcccatgccggggttgaacttacggccgcaggctgttgagtcatgctcaccgtgcgcgtgtcatatgcgcctaccgtgtcggtgaccgtgacctcaaagccatagagcgttttctgcttcacggcagcaagctgagccgtcgcctgtatcgtattgcccccattgagcgataccgttgggccagccacctgtttccatttatagcgcagtgcatcaccgtcaggatcatagcttccagaggctgagagggtaatcttccctgccctgtcagtattgccgggtttaccgaagctttcgcaatcggtgccgcattgtctggcttatcgctgtcggtctgttcaatcttcagcacaaagttatcgaaatggacatcagatatctgcccgctaaccttggtcgcttgaacctgtaaggtcagagaggtactgtccgccggtaacaccatcactaatttattatcaagccagcgattacgcgggtgtttggtatcgagatctttggcctcaagcgtattgccctgcgcgtcgcgtgcaattagcgtcaccttgccataatcgccgtcaccccatccgttgctcttaaaggtcaggattactgaagattttccctggctcaccttatctttgtccagcgcgatgctttgactcatcagatcctgacggtcgttgccggcagcgctgtcgctgagacgagcggtgaagaaatattttccttctgcggctttaatcccgtcctgagtcgtaatcactcggaactggcccttatcaagatgccaggcggacagatcgccgctttccgcgcccgcattacgcaaggtgtcggagagggtatttctacgctctgcgaaaggtcataacgtacgtcgctgtcgcggttttcccatatcggcacctccagctttttcagggccagtccattcacgttttgacgggttgcttgcgttagcggcagtccccatttttcaaagaacgggatcaggttgtacccactcacacgactggtctccagaataaagcgctgaactttttgggcgctgtcatcaggctgctgatttttcggaatttcgcggtagagcttgccaagccgagcataaaagtctttgccaaaggtgagatccagttgccagagcatggcgaccttagcatactggctgttgagattatggtaatcccgactggatttattgagatatgggaacacttgctcgtcccagtgtttgtctttttccaaacgcggattgatgccaagctcgcgctccacgtaaagtgaagtcagattaaccaccacctccgtcatgttatccggcttgctcgagctaccccagtccatcgggatcatctggaactgatggcccaattcatgccatggccccagccattgccgccagccagatttttattattaacgacataacctagatgccctcagcgcaggccatcagacgccaggtggtcgaattcagaaccccgccgcatctgtcattattgataacgccaggcagtgataatccatcgagccagtgaaaacggtgaagaatacgctgatgagggctgttgatattttcgctggtgagtccgtactgattttcagccagcgtcacaattttatcccagcttttaagagccgattctgggccttccgagccgatatttttcatcgcggcggcgcggcgcagggtgatcagtacacgattactttttaattcgacgtaaggaatatcatcgaattttctcagcatttgttgatagtcctgcgcgctgtgttcacccaatacaaaacgcgcaaagggcttccctccgctgcgaatattcaccttgatatcaccggcgatcggcgcgttaaaactggcgatatacagaataccgctcctgtttgaaacgaggatattctccccctttctcaagggctgcctgtaggcatgcgcgaatttcctggttctgtcatccggcgtgtcgacaaaaaattcaagcgctggcgttattgcactcccctgataatcgaggttaatcactaccgcctcgccacgctcaacccaaaaaccggttgattgcaaaggtgactgatcgtaccaacggtattgtttctctacgatttcaggcttaccgggctgctctaaaatgaatatacgaggcgggtcaatggaagcgcgggccgcagctgtttgctctgaaagttgagcgggaagaatttcgttcgccgtggccgaataagcaaaaaatagtgataaagccagtgcagaatatttaaacaaagtccgtttaggcatagcatcctcgttatatttacattttgtaataaatagagggctaatatagacgagtcgaggccgagaatattcccaggcaacgcgggaattattgtcaggtaagtgagaaaatggcccagcgcgtcggggagtttccctggcatctgggcagatagcgaagaaaatatgaacaacgcccgtattccagggcgttgttacgaggcaaagaattttgtttaacgcacgtagtaataaatagccaggaagtggcagaaacagccgcccagtacaaaaccgtgccagatggcgtgcccaaagcgaattcgcttggaagcatagaaaattacgcccagcgtataaatgatgccccggccgccagcagaaccacgccgccgtgcgaaagcttcatcgccagctggtaaatcactatcagcgacaaccagcccatcgtcaggtaaatcaccagcgataacacttcaaaacggtgggcaaaagccagtttaaacagcacgccgaatgcggcaatggaccagatgacgaccatcagtcctttcgccagcggggagtccaaccccaccagcaggaacggtgtataggttcctgcaatcaataaataaatagcgcaatggtcgagtttttttagccagtatttggctttctcatgtgcaatggcgtggtagagcgtggatgctgaaaacagcagtatcatgctgccgccgtacagactgtagctagtgattgccatcgcccctgcgttagcgctaaccgcctgcatcagcaaaagcaccaggccaacgatgccgaaaaccacgccaataccgtggctgaggctgttggcgagttcttcagcccacggataaacctgtggtgaaactttacccatacgttgattcccttaagaccagaaaacaaaccattaaagcgcaacggcactgtatccaagattgattccagtgtacacgtgtaagcttaaatattgtataaagcgatgtaaacgttactcaacaatctttacatattgtgcggtaaggctatttatctcagcttaaaaaatttttatgacgattgggttatgaatagtgggcgaaagcatgatttttttgcttttaggctttatcgtaggagcttaaatgcattgaatatgcaagattcaaggatttttctgaaacagccgtctctaatgactaaggtgtaattatgtccgtagcctccccggcacttaatttcggcccgatgaccgaggtttttcaatttcttatggaaatcgataaattgaaaagcgtgcaacgccgtaccaaagtactgggtacgcagcgtcaggaaaactcggcggagcacagctggcattttgcagttgcggccatgagtctggcgccatttgccggaaaagacgttgatatacaaaaagttattcgtatggcattactgcacgatatcgtcgagatcgacgccggtgacgtcctggtctatgaccttgccgcgcgtgaagcggtccacgctaaagaggttgaggcggccgatcgcctgtttggtatgctgcctgcgccactgagccaacagttcagagatttgtggaatgaatatgaagccggtgaaacgcccgaagcgcgttttgcgctgctcatcgaccgcattctgccggtggtaatgaaccttaataatcagggccagagctgggtagaaaacaacatccgtcttgagcaggtcctgtctcgcaacgcctttatcagtgaaatcaatccactgctgtgggaacacctgctggtgcatctgaaccatgcccacgaacagggctggctgaagtaattacttaataatgccgccactaaattaagttttattaaatagcactcccagactctaccacttccgggagtgcaatgagttttttatttaggaacgcttaacgccgtctgctcgttgtaaggcttcatgatggcatcggcctgcttctgcgcttcagcggcagcggcttccggcgtaagcttggcgtcgttcatcaaagcacccagctgattctccatcgcctgacgcacggcgaccgtttcataggttgcataccacggcatcgcaaacttgagctggtcaagcgctatcgccgcgcgcggatccttggcaaggtaatccttcatctccggcgtatcataagacgccatacgcggcgagaaatagccggtaaagcgactccagctgccgttcactttcgggctcaccagatattgcaggaaggtaaaggccgcttttttctgttcgtcggaaatccccttaaagctgaccaggcttgctccgccaatggtcacggcgttacgcacctctttaggcatcatcgccacgcccagctcaaagtctttggtgttttcacgcataaagcctagtgcgccagtactcagcatcgccatgcccagttttcccgagaagaaggcggcgctaatctgcttcgagttcagcacaccggctggcatcactttgtcgcgataaaccagattctgccagaagcgcagcgcaccaatggtggacggctggttgtaatagacttcgcccggatagtcggcgttgaagtagttgccgccgttggcgcgagtcagtgcagagaggatccaggcaccgtagtcatcgttggttgagggcagcattacgccccactgccctttcgattcgtcggtcagctttttggcatccgccaaaagttcggcccagtcgaccggtggatggtcgataccggccttcttaaacatatctttattgtaataaaggataggcgtcgagttatggaacggaattgcgtaggtcacgccgttaacctgtgcattctgacgcatcgcgggccagaagttttcactcaggaatggcgttgccttttggttgccgtatttaaacagctcatccatcggcaggatttcatttttaatcgccagatcggcggtgaagttggcagacataatgaccaaggccggtggttcaccggatttcgctgccgcctcggctttcaccttggtagtgtcgtagttgccggtgaagatgccgcgcacctcaacgtcattctgcgactggttgaactccttgatgacccgcgtcatctccatcgtcagtttgccgtcgaccggcgcggggaacatgaaatcaatactctgttttgctgatacggcgcacgcagtcatcatggtgactgctaaggtgagcgcctggatattacgcattctgactctcccggtgtaagttttgctggttttgacctgaaaaaagatgaatgtcgtgcaaggaaaaactcaggctgacctgctgattggcctggggggcattaccacggttttcacgcaggtagcgcagggcgcccaatggtgactgcgcgtggttgagatagtccgccccagcagttcgcagtaagtcaatgacgcctcgagatgaaggcgttcgcccggattgcccgggtcccgataggccgaactgtcgtcgatgtgttcaggtctgatgcccaaataaacctcggtcagctggcgtgcatgcgcggtatcgggcagattgacggcctgattgccgaccatcaccacgccgtcgcggcagggaagtttgaaaatgttcatcgctggcgtgccgatgaatccggccacaaacaggtttgcaggatgcgcgtacagtgtctgcggtgcgccaatctgctgcagatgccccttgttgagcaccgcaatgcgatcggccatggtcatcgcttccatctgatcgtgggtgacatagaccgtgctggttttcagctgctggtgcagcgtcatgatgccgtcgcgcacctcggttctcagccgcgcatcgagattcgacagcggctcatccatcagaaacagcttagggtcacgcacgatcgcccgcgccatcgccacgcgctgccgctgaccgcccgaaagcttgcccggcttgcggttaagcagttcgccgagctgcaagaggtccgccacgcggtcgacccgcgcccggtgctttgacttaggctcgttgcgcatgcgcatgccgaaggtaatgttctgttccaccgtcatgtgcgggaagagggcgtaattctggaagatcatcgagaagttacgctcacgcggttccagcgccgtgatgtcagttcccgcctgtaaaatccgcccctcggtaacctgctccaggccggccaacaggcgcagcagcgtactcttcccacagcctgaaggtccaaccagcaccagaaactcgccgtcggctatttcgagcgacagattattgaccgccatgctgccttcaaactgcttgctgatattttccagacggagactcgacattatttttcatccaccgggcagctgatattggcatcgtaaagatagggtcccggatactgtgaaagcggatgcagatagctgaccaaaccggtgttatcgaccaggcggtgcatcaggcaggccgctggctcgaggttgtaataggggcagggttctcgtgatagtaaggaacctgatggacggtaccgggaatggtggtgataatcgcctgacgatactgggtaaagatcaaacgatgggtatggccacagaatacgcggcacagcgaaggaaagcgttcgatcagtgccagcagttggtcaccgttctcgcaggcaatacggtccatctgcgccgagccgagcttcatcggtggatggtgcataaataccgccgtcggtttgtcgccgccctgctccagctgggcctcaagccaagacaaggtttccagcgtcaaccagcccttcgactcgccgggtacgctggtgtcgataaacagcaggcgcatgtcaaaatcatcgaccgcatagtgcatattctgcgggtcagttcccagcagcggacacagcgggcccatggattccaggaactgcgctttgtcgtcgtgattgccgggaataatgtacagcggatagtgcaaattgctcaacgtacgtcgtgcaacctgatattcggaggctaaaccgcagttaacgatgtctccggtgatgattaccgcatcgggacgttcttccagcgcattaagctggctcaccacctcggcgttgcaggcgttaacgtcgataaagtcatacagcttgcggccgtggctgcgaaaatgcatgtcggaaatttgtgctaaaaacatgagaactccctatttaatgcctgaaaaaccgaagcttttaaggaactgtttctgaaaaatgataaaagccaacatcagcgggaagcagaccatcagcgtgcctgcggtaatgagtccccattgcccgcccgactcggcgcccatcgcgaatgacaccagccccacggtcagcacctgtttatcagggtcattgagcaccatcagcggccacagatattcgttccagtgataggtcacgctgacggtagcgaaggccagaatggcgggccaagacatcgggataagcacgcggaacaccacctgccaccagcggcaaccctccatcagcgcggcctcttcaatttcacgcgggatggcgagaaacgcctgacgcatcaggaacacaccgaacgccgaggcaaagtacggcatcatggtgcccgtcaaggtattgagcagaccaatctgtttaaggatcatcatgttaggcaccatcatgatcaccggcataatcatcagctgaatgagcagcagatagaacagcgtctgcttgccgcgaaactcgtgataggcaaagacgtagcccgccgtggtgatggtgaccaactggaccagaaaagtgccaaaggcgaagaacagcgtgttggcatagagccgcagccagtcggcgctttcccaagcctgacggaagttgtcgaacgtcagcggaaagcgcggcagcattgaagccatgtcaggcgagaagctgctttcgctaaacgccgacgagagcatccagataaacggcgttaaccacagcagcgcggcacaacacagtaaaatcggcagcgtcatgcgcgaactgcggcgcagaagccgcgttccctgacgtggcacggcgcgacttttcacgctcagtggtggtgatgtttcaacgctcatggtgagctcctctttccagaacgcgcagattgagaaccgagaaggcaaacagcaacagcagcgtgataaaggtcgccgccgaggctttacctaaatcgtgcgtgtcgttggcgagactctgaatgtaataaagcagcacggtggttgcgttgttcggcccaccctgagtcataactgcgacgtggtcgatttgggtgatggaataaatcagcgcgatagtgaccacaaagctgatggtcggtctcagcagcggcaaggtaatgtagaaaaacacctgggtacgcgacgcgccttccatcagcgccgcctcgcgcgccgaagcaggaatagactgcaaaccggccaggaaaaacagcatgtaatacccggcgaacttccagacgccaatcacgctcagggcaatcagcgccgtattgctcatgcccaaatagttgttgttcatcggaccgaaaaacttggccaggtagtagtcgagcagccccattcccggcatgaagataaacagccacagggttgcggcgctcaccagcgggataatcattgggaagaagaaggcggtacgcagccagcgattaagcgaggtgttttcccatagtgccaccgccaacagcagcgccagcacgataccgggaatgacggtcatcagaatgtaggcaaggttattgagcagcgcgcgccaaaacaccgcgtcttcaaacaggcgctgatagttttgcaggccgacaaagggaggattgctgcttgccatgcggctgtcgaacaggctgtccattgccgaacgcagcagtgggaagtaggtaaaagcaaacagaaagaccagagtcggcaataaaatcaggtaagggaatatcttgtgtcgcatcgctcatttccagcgggtcttgattggatgcttaccctagtctttctgtatttcagtaaaatgtcagtaatgtgattatttaatatgcaaatgttattgaacaatctgcggctgagcggacgcctgacgctccagcgcctcttcgtagcttggcatcgaggcggccgccccgctctttcgacgcacaccgacgcataggctgaagcaaaacgggccgcatcgtccagcggtataccgcccgcgagctgtgaggccagcgcgccgttaaaagcgtcgcctgcaccggtggtgtctttcggcacggcaggaatggcggcaatcagctgcgtttgccccgccaccgacagcagcgcgccctgcgtaccgagcgtaataatcagcgccttgatgcctttgccatgcaacaccttcgctgcccgctgcgccgaggcaatatcgttgacttcaattccggtcagcaacgtgcactcggtagcgttggggtcagcagatccactttcgacaacagtaggtcggaaactggctggaaaggcgcagggtttaaaataatgtacgtcccggcctcggcggcaatatcaatgaccctctcaatggccggaagattgttttcaagctgcgtgagtaggatgtcggcggcggcgatagcaggtcggcactgttctatctcgtcctgagtaaaagtcaggttcgcgcccggatcgacggcaatcatgttttcggcatcgacgcccgccacataaatgagcgcgttgccggtcgggtaatcggcggttgaaaaaagcgtgacggcgtcaaacccggcgctgtcgaggtggcggcgtgcaaaggtgccgaaatcatcgcgtccgaccttaccgatgtagtgtacgcgcgccccggcgcgcagggcggcgaccgcctggttggcccctttgcctcccgccccatcatgctgttatgggcaatcaacgactcgcccggctgcggaaaacgtgacattcccgccacgatatccaggttaaaagagcctaaaacgcagactttgcctttcttcatgcctttctccttagtggcattgcgatgccggaaccctgaggttcataaagattaaagtcgcgctcggcggccagacaggcgccgcgacagcccgtttcatccgttacgccgctcaacactatcgtcagaccattggccggttgcggtccgcgcagatgactgcgaatttgccgttcgagcctcgacagcgggaatcccgccatcgacagcacgccgccgccgagcaccagatactgcgggtcgaggatgttcatttcagtcgcgatcgtccgccccagacggtcaacaaattcgactaaatcaggatgctcgccgaagtcggtaaacagccgctcaaacgccgtctcggcggcatgctgacgcttccaccccgccagccagttgcccgaggtcagcgtctcgacgcagccgattttgccacagggacaaagtgccggatttcctgccaacggaatgtgaccgagttcaccggccgcgccgtgtgcaccgtgataaaagtcctgattaagccacaggctgttgccaagcccggtgccgagatacacgccgaccgccacgtcaggcagctgcaccagacgggttaagtcccaccacatcagatggttaacgtctttgtccatgaccaccggcaaccccagtcgctctgacagcagccgtgcaacgggctggtcgtcgagcgccggaataaacggcagtgacagcacggtctggcgatcgcgcgagaggatcccgggcagccccagcatcactctggcaacctgttctgccttgcccgcctgctgtaaatagtcgctaatcacctgctgaaggccgctcagcgggtcgctcaaccccgcccaagactgcgtcgccacttttctgtaaccatgaaacgtctgactgctgtccatcagcatcaaacgcgtgctggttccgccaatatctacgccgagaaaataccgcatacggctctcctgcccttaggctgcctgacgtgccagacgcatctgatcgagcattttgtcccaggctttatccagatctttatccagattgaacaggccagaggtgcccacgatcaagacttctgcgccagcggccatcagatcctgataggtgcgttcgttgcaggatccgtcgatttcgatcagatatttgtagccatgctgctgcttcagggcacgcagctggctgactttattgagcatttcagggatgaacggctgtccggcatagcccggatcgaccgtcatgatggtgattttgtccagcaggtgaatatagtgctgaataaattccaccggcgtcgccggatttaacactacaccgacctttttgccgaacgatcggatctggttgatcacgcgaaacgcatcgcggttgatggtttcagcgtgtggacagataaaatcggcccccgcgttggcgatcgcctcgataaagtcggtcggattctccaccatcatatgcacgtccagcaccagcggcgtgtgcggacgaatctgctcgataaagaacggcgacagggtgatatttttcacatagtgtccgtccatgatatcgatgtgcagcatgtcagcgcggcgattgagcaccgagagctgctctttgatatcaaacaggctcatgcacattaatgaaggcgaaattttgtattccatggcgttttcctcatggccccagaggccgatggtcagagagttgtcagtcattaattgatttctttaattcaaagttgagcggcgcgcgctttggcggcgctgcggcggctggcccgacgttgcaaataacggttgcggaagaatttcaccgccagcaccgcaatcagcaccacgccccacatcgccaggctgaagtgcggactgacattgagcaggttcagaccggtcgcgataacctgtaaaacaatcagcgagagcactacgccgctgaccttgccgaagccgccaaacggatccgttcccccgagaatgatcgccagcacggtgagcagcagataagagtcgccgtagcccatgcgcgccgaattgaagcgcgccatcatgatgagtccggcaatcacgcaaagcatgctcgacagcacgtagatggcaatcagtacgcgatgggtgttcacgccgctaaagtgggtggcattgatgttgctgccgctcatgtagatgtatttaccgaggcgggtacgctcgagaaataccgaaataaccaccgcggtcgccaggaaaacgatcagcggtaccggcacgccgagcacggtctcggccccgataaagcgcacgatgtccggcatgccgctcaacgcagcgccgcgtgaaagatagataccaatgccgttgaccatggtcatggtcgccagcgtcaccagaatcgggtgcgcgccgatataggccaccagcgcgccggtcagcacgccgattgccagcgccagaatcattgccccaaccagcgccagagtcagccacaccgcctgcatcagcaggctggcgtccggcggcagataggtcataaacacccaggccatcagcaggctggtcaaattggcggtggcgataatgcacaaattcagaccgccgctcaggatggggataaacatcgccagggtcagcaggcccagttcgggcagctggaaggcaacgctcatgaaggttgcgtcactgaaaaaacgccccggcatggcgatgctgaagcccaccaccaccagaaccagcagcaaaatcagcccgatattggttgcgtccattttgaaacgtggaagcgggaggaccttgctgtcggttttctgtttcatcgttaaactcttggattttgcaaacatggctgcactccttgggtatcagcaaaaacgggcatcaggcaaagccgacgtcggtttctttgcgtttcttgtaatgcgtaacggtgatagccaccacgatcacgccgccgatcaccacattcatgaagtagttggacacgcctatcagattcagcccgtttttcaggataccaatcagaaatacgcccatcagcgtccccacgacgctccctttgccgccgttgaggctggcaccgcccagcaccgccgcggccagtacgtcgagctcaccgccgaccaacgcgttaggcaccacctcgccgacgcgataaacctgcaccagaccgccaatcgccgccattgcgccgagatagccataggcaaacaggtgcagcagccccacgcgaatgccgatacggcgtgcggattcctggtctccaccgacggcaaacagctgccgcccgaggtgcgttttgtttaacagcacccaggtcatcgcggcgaccagcagcatcacgaccagcggtaacccaatctggtaatgctcggctccgacgctaaaaggcagcactttcaaggggtaatgagccagtcaggcaggtcgtacaggctggtcccgttggtgagccacatcagcatgccaaacagcagcgactgcatgctgatggtgacgatgatcgacacaatgcgcagacagtaaataagcaccgcgttaaccatgcccagcgtggtcccgatagccatcgccagcactatgctgccgagcggattggtcatgccgtagcgaatggccagcgtggcaatgatgtactgcaccaccgacgcgacggcggcgaaggagatatcgataccgccggtgaccagcaccacgaacaggccgagcgcaaagatgccgctgaccgcgtagctttcgctgagatcaagcaggttgcgcagcgtcatgaactgcggcgtcgacagcgtaaaaatgacaatcagtgccaccagcacccaggccagatagccctcgttattggcgggtttcaatcggttgagattaagcatttaccgcctccgcaagctgctgctgcgttattccgcgcgggaagtattcgcccagtacagtgccttcgctaaagtgcagtactcggtcacagttgaaatacacttcaggaacttcgtctgaaatcagtaagatggagatcccttctgccgccagctggtggatcaactgataaatgctggccttggcaccgacgtcaacgcccaccgttggcgagtcaaggatcaggatcttcggctgcgtcagcacccatttagcgagcacgatcttttgctgattgccgccggacagcgtcgagatggcctgatccgggctggccaccttaacgcccagcttttcgatccattcaaggacaatgcggtttttacgatactcgtcgatcaagtgaaaacgactgcgcagcgtttccataatcgccagtacggtgttgtctcccaccgactgctgctgtaccagccccagcgtcaggcgatcctcggagacgtagccgatgccggacttgatggcgtcttcatgaccgcgaaagcgcacgggcttgctgtcgagatagatttttccgctgtcgggtttggtcatgccaaacaggctgagcgccagctcggttcgccccgatcccagcagaccgcataggccaagcacttcgccctgatacagcttgagattgacgttgtggtattgatcggcgcggctgaggttgtccagctcgagcatgatgcgttcatcgtgctggttggccgctttcagcgcgtaattgagtttcagaccggtcatcagctcggtcagtctttcgctgctgacctcggctgccgggaaggtcccgactttctgaccgtcgcgaatgaccgtcacgcgatcggaaatctccagcacctcatcgagacgatggctgacgaacacgacgcttatccccttctgcttgagatagtgcacggtacgcagcagctgattgacctcggtgcgggtcagcgacgccgtcggttcgtccatgataaccagccgcgcatcggcgaccagcgcgcggcaaatcgcaacctgctgacgctgggcaatcggcagctcggcaaccttgctgtcgagatcgagcgaaaagttcagttcgtcgagaatgcgctgcgcggtctggcgcagacgcccagggcgataccagccgagcaggccgtgcaggttatgctcaaaagcgatgttctcggcgacgctcagattcgggaacagcgacaggtcctgatagataacctgaatgccaaagctgcgcgcctgatccggcgtcagtttgctgaacgtctgctcgccgagtgaaattttgcagccgctgtcaggctggtagaccccgagatgatcttaatcagcgtgcttttaccgcagccgttagtcccggccaggcaatgcacttcgccgggcatcagccgcagagcaatattgttcagcgcacgctgtccgccgaaggtcacggaaaggtctttgacgtcgattaacggacgcacgctttcagtgcccgtcgtgtcatgctggataatctcggagatcgccataattacagccccattttgaccagtttcggcaggttgtctttgtcgagactttcggtacggttacctacgatggtgtgcgtcgtctcatcgaccttcaccttgcccatgccttcgatgtccatgccgtcggtgattttctcgcccttcgccatcattccggcgatgcgcacgaagatttcacccgcgaccatcgggttccagatatacccccgctgatggcgccgcttttcactagtgacgccccctgccccggactgaacgggccaaatacgcagatatcgcccgccttgccgcggttcaataccgcacggcctgcgccaatcggtccctgagagccgatagccagaatgccttttagatccgggtacttggacatcaggtcattggtggtgcggatggtgtcatccagcgattcggctacgccaaagcggtcgcccacctggtgcatattggggtagtgttcctgctggtatttcactgcggcgtcggcccaggtcttgtgcaccggcacggtcagactgccaacgtagaccgcatagctgccggtctctttcatgcattttgctagagcaatcatgtggttgatgccgtgttgctgcgcatcgaccatctcaaagtcccagtcggcgtatttctgatccggtgattcgtgggtaataattttgattccggcgtcgtgagcgcgtttcaacactggctccagcacttttgcatcgttcgggactacgccgatgatgtcgaccttctgagcaatcaggtcttcgatagcacgcacctgcagggcaggatcggcgccggttgggccaacctggaaggcgtcgatcccttctttcgccgcctcctgcttgatgccgacctccatcgcgttaaaccacggatttccccaacctttaccaccacgcccatgcgaatcttgtcggcggcgtgcaccgataaagaaagacaggcggtagcgaacaggcaggcaaggacagttttcttcatgttgattactccacaaaatgtcagttttttaccgcagtcagtggctcaccacggctgttattgttgttgtgacttatcgataagatgttttttaaatgggaaaaggatctccccggtgggtctttggcttgctcctgaccggcgaaacctcaatcacgttgacgttgctccaggccagttcctgacggaactcatcgtcttccagggagtcggtaatcaacgtatctatctcccggtaatggcagatacgggcaaacgagcggcggccaaacttgctggagtcggccagcaaaatcttgtgctccgacgacagcaccatctgctgcttgagacgcgcgtgatgctcgttgctctcacgaataccgccttcatggctgataccgtgacaggagaaaaacagtttgttaatcacgaactctttcaaaatcttctcggccagcacgccgataaaatcctcatacttggccgaatattcaccgcccagcccgatggtttttacgttggccttggcggccagggtctggatgatgtgcagcgaattggtcagcaccaccagctgaatatccggcagctggcgcgccagaaaccaactggtcgagctgctgtcgagcagcaggcagtcaccgggattaatcagtgccagcgctcgtttagcgatgcgcgttttctggtccggtgactgattgctgcgctcgcgaaatgattcaccctgttctatctgcgcaggcacgtagagcgtttcattttcatggcgattcacaaacaccgctccaccgtggctgcgcaacagcaccccatgtttctcgagtagcgcgagatcgcggcgcgcggtctccatcgagatatggcacatggcagcgacctcctgcaccagcacccgaccacgttggctaaggacttcggtaataaagcgatgacgttctacaggcagcatttttttccccttcccgatgtttattaagatacgcaaccgctcgcatgctgaatgcgcgttgcctcaaagcgggcagcgcggtctttttgccgcgttctccgtgtgatagttgtcaaaaaaaaatgagaaaaggtgaaacctttaattcaggatttgtggtgggcctgcattaaatcgctttcaatcttgcaagccgtcactggcatttcggcaaacggtcacaattcctcgccaaagtttttgaccgtttatgaccgtttgtgtggcattgaccgaattcggtcatcgctggatgagttgggatgacaattcaaagcggaatctgtgaagatgctcagggaatcgcggccgtaaaacaggggaatgcacccgcaagacccggcgcaggagcaataaaaaaagcgaccacaaaggatcgctttaacggttcttttcccgaaacagcgctcggtatttatagcggttttttggccgtctctttggccgcaaatacggctagcagagtgataagcagcgtcaatgtgacatagcccgagaccgccaacgtggtgctgtattctttatacaatgaggtgatgatcaatggcgcaaaaccaccgccgacgatccccgaaagcgtatacgccagcgaagaacccgcatagcgcacgcgcgtggggaactgttcggtcacaaacgccgcctgcggaccgtacataatggcgtgaacctgcagtccgccgatcaccgccagacaaatcagcaccgggtgcgcgctatcgagcagcataaagaagacgaaagaccaggcaatcgctaacgcagcgcccatgatatataccggacggcggccccatttatccgacagcgcaccaaacattggtacggtgatggcgttaccgagcgcgccgagcatagtggccgtcagcgccaacggtcgcggtagatgcagaaccgtggtcacgtaggttagcgtgaagaccaccaccagcgcatagagcacgtcggagccaatgcgtgctcctccggcgaccagtagaggccgcagatgctggctgaatacttctttaatcggcgtgtgggtggtgtttttagtctgctccagtttaaggaacgccggcgtctcaccgacgccacggcgcagccacaggccgaacatcaccaataccagactcagcacgaacggaatacgccagccccacagttggaagtcatcggcagaaagaaacaccgtgaccagcgtgataagcccggtgccaataagcgtgccgcatgacggccccacctgcgcaaacgaagcattacgcccacgctgctcgggttttccgtgctccatcgacagcagtaccgcaccggcccattccccgccgagcgcaatgccctgaataaagcgcaggctgaccaacagcagcggactccagataccccagcttgcatagcctggcagcatgcccatcagcgccgtggtcaccccatgataacaagcgtggtcaccagtacaaatttgcgcccgagtacgtctcccagatgaccaaacaccatgccgccgattgggcgtgacacatagccgaccgcgtaggtcgagaaggccagaatcgtgccaaccagcggatcgaatgacggaaagaacacgtggttaaaaatcagcgcggccatgatgttgtagacggtaaagtcgtaccattccagcgcggtaccaatcgaactggccgccgccaaacgtccggtgttaggcggagtatgctcagcgctggcggttttcggagataaaatctttggattatcggtcgaagaaagactcataatttcaactcctgtgcggtaagttgccagccgaggccgtagtgcagcacctcgtcaagcgggtagtccagcgcgtggcaggcgtgcgcggcaagacgttcggaggcttcaaggctgctgctttcaagcaacatcatcggcagcagctggcggttatcggtcgactctttcggcaacggcgtgctgagtgccgtatccggcgttaacaagctagagcgaataaatccgtcgtgggaaaacagcgtggtccccaactcggcaatacgactttcttccgtatccgccggcagcgtaatgatggcgagatggctaccgttgcctatgcccaccaccgcgctaattgcgcagacgcggcgcatgggcgactgcatcttttgcagattggcgactgaccatgcggtctggcgggtaaaggccgcgtgatacgccgcggaggtaaagctttcgagcgatcgggttttatacaggcccagatatttgcgtccgcccttcagcgactgatagcgcgtgccggacaggaagccttcgatccgcacacgttcttcgacgtgttcacgatcgtaccattggttgaaatccgcttcgtcctgagcggcgacgtcggttgctacaaaaagcatgccctgatgggaagagttcataatggttcctgtcattgtccagagtggtgaataagtgtcgtcgtgtctgtttctgtttattaaaattgagaagtagaaatcaggcgttaaggcagcgttctatctccagtgcccagctcatcagcgcctcgtcctgcatcggcagtgccgcaaccatcaacccgaccggcgcagcgccttcggcctgacaaggcagggagaccgcacagccgtcgaggaaattgataacagaaggattacgcagcgcggcaccgttgatacggaaatagagctcctcatcggcttcaagctcggcgatacccggcgcgacaaaaggcacagtcggcatcagcagcgcgtcatactgttgtacccgcgcgctgacccgctgctgccagtcagtgcgctgctgcaccagccgttgacgcgaggtttcgcccaacggctcaccgcggcgaatgcgcgagaccacgcgcgggtcatagccgtccgcgcgttgcgcgattaaatctttgtgccacgcccacgattccagcgcggtgaaaccgccactggcgttgatagtggccagttcagagagttcggtcagagggatttcggtcaccgtggcaccggcctgcctcaggtgggcaatcgcgcgagcaaaggcatcgctcactgcggcatcgagaccgtcgagtaccaaagtttgcggaacggcaaagtgcgcttcggacaagtctttcaccgtcagtgataacggttgtttggcgatggctgcgtcgagcgcaacgcagctcgcgacatcacgggccagggtgcctaccgagtcgagcgaggctgagagcggcaacacgccagccatggaaattcggcgtgccgtcggtttaaaaccggtcagtccgcagaacgcggccggaatgcgcaccgagcctccggtatcgctgccgaccgcgccaaagcacatgtcgtcagaaacggaaacggccgcgcccgatgaagagccacccggaatgcggcgcgctgtgcgatcccaggggttagccggcgtgccgtaatgcgggttgatgcccagccccgaataggcaaactcggtcatattggttttacccactatcaccgcaccggccttaagcaacctttcgactatctcggcgtgcgccgtggcggcgggtgcctcggccagcacgcgcgatccgccggtggtgacataacccgacacgtcgaacaggtccttgaccgataccggcacaccgtcaatcggtgaaatggcgttatcggcggcacggcgcgcggtggaagccgccgcctgctcacgcgcccactgcgcataaacctgcgtgaaggcgcggcggccttcgccgtcttcggcagaaatctgggccagtgcctgctcggtcagctgctcgggcgttaccgtgccgagtgccagttgttcaatcgcctgctgtaggcttaatgaaaggtgagaattcatcgttgcttcctggggtggctcaagttgggttaacgccgccgttaggcaacgacgggcagttcaaggctgtgataggcatggctgatgctgcgcccgaggcgttcatcgaccagctccatgcgaaactctgttgcaggacgaatgccacctatcgccgcgacggtgccacaggtcatccctaacccttctgccggaaggggtcgccgttcagataacggctcagcaggtcgtcgggctgacgcaggctcgacagcggcccttgctgatacagacgaaattcaccgtcttccttgatccaggcacgcaggatcaactgatcccaatgggctgccacttcgctcatacgccatgcgaccgttgccacaggcttcacacacagctgcttcgacagtgccacgctgtgcgactcgagctcacggtcggtgtgatcggaggcgagcgagacgtatagctccccttgatgggtgaaaataaacacttcggcctcaccggaactggcacggcctatcacttctaccgatttattttgcgtcagctggttggcggccacgcggtaaaacagcgggactgcactcggacggggcacgcccagcgcctcaagctcactaatgtggtgcatgatggcttcaggatcgcgtcctgcccatccggcgatcaccagactgtcgatatcgacctcgatccttgccgcgtctgagctggagggttgatttccggtcgttaatgccggcagtgtgaaggtcagtttcatcgggcagatcctctattaattaatcttttttaaaaacacagtgaaatttcactataacttcattcattaaataagcgatttccgtgccatgtttttgtgtagaatgtctaaaaatcttttcagcaggagctggatgtgaagaccgaggtcacagaaacgcaggaaagaccggcgattgatgaagcaggattgtcgttaaacgagcaggcgtatcgccgtttcaagcaggcgctggtgaccctgagctataagccaggcgaatatttgaataccgcacaggtgatgagcgacctgtcgatgggtcgtacgccggttaatcaggccatccaccggctgtcgaatgaagggctgctgcaaattattccgcgcaagggagtgatggtgtcgccgctgtcgatagacgacgcgctggaactgattgaagttcgtctggcgaatgaggtgctatgtatgaagctggccagccagcgcattgccgctcaggacatcgccgagcttgaagccatcaaccaacaaattgaggtcgccagccaacagcgcgatcgcgatggcatgatgctgctagataaccagtttcatcagctgctggccaaggttgcaggcaacaaaatgctgatggatattctcagcgtgctgcacgcgcaggcgcagcgcttctgggccagctcactgtcgaaagaggggcacatgcaggaagttattgaggagcatcgggcgattataagcgcactggcggcacgggacgcacaggccgccgccgatgccgccgagggacatattctgtcgttccgcaatgcgctgttgcgcggttaagaacgacgttcaaggggattatcttccgccagacagttcaataaaactgccggtcacataagacgcggcgtctgagagcagccagacaatcccttgtgccacctcgtcaggctggccgccgcgctgcatcggcagattggcttttagcctgtcgacccgccccggctcgccgccgctggcgtgcatctcggtatagatcaaaccgggcctgacgccgttaacgcgaatgccctgcgccgccacttcgagagagagacccgtggtcaaggtatcgacggcccctttcgacgccgcgtagtcgatgtattcattcggcgcacccagccgtgaggccgctgaagagacgttaactatcgccccaccctgcccaccgtggcgcgtcgacatcactttcaccgcctcgcggcagcagagaaaatagccggtcacgttagtgcttaacacgcgattaatccgctcggcgctgagattttcaatcgtcgactgctgaaacaaaatgcccgcattattaaccaaagcggttaatggccccatttcatcggcaatttttctaaacatcgccacgacctgattttcatcggcaacgtcagcctggatcgccagcgcctctccgccgtttgcctttatctcatcaacaacctgctgtgccgccttggcgtcattcacataattaaccgcaacctgatagccccttcggccaacaacagcgccgttgctcgtccaatgccacggctgccgccggtgaccagcgcgatgtttttgctcatagtaaatccttctctaacgttgtccatttagtgtaaaaactgacggcttattggtgcccattttttacccgattgcgtatgatgctttacgcacacgatagataacataaccaatattaagggaataataacgatgaaatctccggcagcctatttatcctcgtcacgcctttcttcactgtttcattcgggaaaaaattttcatccgacgagaaaactgctcgcttgcctgatgctggccagcgttacgctcagcacgctcccctcaacgtacaggcctcagaaaacggcaatcttccggggctcatcaatgaacgtctctcctatatgaaagacgtcgccagcagtaaggcggaaaaccaccagcccgttgaggtagtggcgcaggaagacagagtgttgcaagacacccaaaaagtggcggaaggtctggggctggatccaaactcggtcaaaccctttatcgtggcgcagatgagcgcagcgaaagccattcagtatcgctatcgtgccgactggctctccacgccggaaaccgactggaagccgcgcccgctggagtcaatacgccaggacattgccggattatcgacgcggatcctccagcgtctggcggtcgagctcaaggctaatggtcgtatttcaccggataaccaagccgaatttatcgcccagcttcagcaaaaaaatctcaatgaggcggataaaattttactgtttaaaacacttgagcaagtacgtttaaagtaattcctcattttaagttatagagcatgatcaaaagttgctattttgtagcaaatatatttcgaatcatttggttcaatgtataatgcgccggatttctctctgcatttcaggcttcatatacaatgaaaacaaaatttcttgctctttcccctctggctgcaggtattttaatttggtcagcggggagcgttgttcaggctcaagctactgattttcttaatcaggacacattaaccggcgactggggcggtgctcgtactcagcttaaaaacgacggtgtaaccctcagtggtgaatatgtttctgaaacagcaggcgtgttacacggtggcgaaagctatggcacacgttacgcgcagcaggtcaaagtgggtgccacctttgatctgaataaaatgttcgacgctgagcacgcgggtacccttcaggttaccatcaacgatcgtcgcgggcgcagcacctctagcgatctggtcggtaaccgtctgccggttcaggaagacgtagggggcgaatacacccgactgtcagaattcagctatgccaactggctgctgacgccgaagcttacctataaggttggcctgatggcgatgggcaatgactttggcggcatgccgattctcggcaactttgtgaacgccggttttgatgctcacccactcagcctgtcaggcagcagcggttggggcaactacccgacggcacacttcgggggtgaactgcgctatgatttcaacgagagctgggcgttacatacggccatctttaacgttaacccgcagaccaactccgcgccgtccaaggccttcaagccttttagcagcggaacgaccggggccatcattcccgtagagcttatttatagctatcacggcttcctgccgggacagtataagtttggctattaccacgacacctctaaagttgcgcgtatcggcgacagccagagtaagtcatccggtcgcagcggcggctacgtgctggcagatcagacggtatggcagtcacaggcgttgaaatcgcagaacctgcacgtcttcgggcagtggactacaacggacgccgccaccgcgcctttccgtcactggtacgccgctggcctgatactgaatggcccgttcgagtcgcgtcctaaagactctatcgccatcggttacggcaaagcgtcttacaacagaaagagccgcgatgttgatattgccaacatgcgcgcagccggaaactatgccggtgccgatgcggcagagaacctgagcatggccgagcagttggtggaactgtcttataacgttcaggcgacgccttggctatcagtgcgtccaagcctgcaatatgacaaagatcctggcgcattctccagcaaggtcatcactgacgcctgggttgccgccgtacaggttaaaatcgagctttaatcgcctcaattggtcgataaaaacaaaaatccctgacatcgctgtcagggatttttttatcgacctaatcctgcgaaacgtattattcgtagtcgctaatcggtacacaggagcagaacaggttacggtcgccgtacacgtcatcaagacgcttcacggttggccagtacttgtcttcacttcccgccgggaacaccgccagctcacgggtataatcgtgggtccagttacagaccagctccgcctgcgtgtgtggcgcattcaccagagggttgtcttccagcgtccatttgccctgtgccacgttttcgatttcagcgcggatagacagcagcgcatcgatgaagcggtccagttcaactttgctttcagattccgttggctcaaccatcagcgttcccgccaccgggaaggacatggtcggtgcgtggaaaccgtagtcgatcagacgcttggcgatgtccatttcgctgatgccggttgcctctttcagcggacgaatatcaagaatacattcgtgcgccacgcggccgtcacgaccggtatagagcaccggatacgcgtctttcaaacgggtagcaatatagttggcgttcaggatagcgacctggctcgcctgcttcagaccttctgcgcccatcatacggatatacatccagctgattggcagaatagaggcgctgccgaacggtgccgcagaaaccgcgccgttctgggtcagaacgccgtcaatctgtaccacgctgtggcccggaacgaacggtgccagatgcgctttaacgccgattgggcccatgcccggaccgccgccgccgtgcgggatacagaaggttttatgcaggttaaggtgcgacacgtccgcgccgatgtagcccggcgtcgtgatgccaacctgggcgttcatgttcgcgccgtcgagataaacctgaccgccgtactggtgaacaatctggcacacttcgcggatggtttcttcatacacgccatgggtagacgggtaggtcaccatgatacaggacagctcgtcacccgcctgtgccgctttctcacgcaaatcgctgaggtcgatgttgccctgcttgtcacaggcaaccaccactacgctcatgctcgccatctgtgccgacgccgggttggtgccgtgcgcagagcttgggatcagacagatatgacggctgccttcgttgcggctttcgtggtaatgacgaatcgccagcaggcccgcgtattcgccctgtgcgcctgagttaggctgcatgcacaccgcgtcatagccggttaactgcaccagccactgcgaaagctgcccgatcatctgctgataaccgctcgcctgctcaatcgggcagaacggatgcagttcagcgaactccggccaggtaatggggatcatctctgccgcagcgttaagtttcatggtgcaggaacccagcgggatcatcgcctgattcagcgccagatcctttttctcgaggcggtgcatatagcgcatcatctcggtttcgctgtggtacttgttgaacaccgggtgagtcagaataggatcctgacgcagtaccgcagccggaatggcgttgctgtcggtgctggctgccttgtcgagtgcgtcgatgtccagagcgtggtcatcgcccagcaataccgcgaacaggttctgcacgtcttcgcgtgaggtcgtttcgtccagcgtgatgcccacggcgttgtgaatatcggtacggaaattcagaccgaagcttagcgcgcgttccagcaccgcagccttgtcctggacttcgacagtcagggtgtcgaaccaggtattatgacgcagcgtcaagccgcctttcttcaggccaagagccagaatgttggtcaggcggtgaatacggttagcaatgcgtttcaggccttcaggtccgtggaacacggcatacaggctggcgatgtttgccagcagcacctgagaggtacaaatgttggagttggccttctcgcggcggatgtgctgctcgcgggtctgcatcgccattcgcagcgcggtgttgcctgctgcatcgcgtgaaacaccgataatacggccaggcatcgagcgtttgaactcgtcgcggcaggcgaagaaggcggcgtgtggaccgccgtagcccatcggcacgccgaagcgttgcgccgaaccaaagacgacgtctgcgccctgcttgccgggagcggtcagtagaacgagtgccatgatatccgcggcaacgctggtgatgattttgcgagatttcatctcggtgaacagtgcgctgtagtcatgcacttcaccggtggtgccaacctgctgcaccagcacaccgaacacgccgtcgagttccagcaccttttcggctttatcgacgatgatgtcaaaaccaaaggtttcggcacgggtacggaccacgtcgagggtctgcggatgcacgtcgtcggccacgaagaaacggttagcgtctttcagcttgctggcgcgcttggccagagccattgcttcagcggcggcggttgcttcgtcgagtagtgacgcagaggccaggtccaggccggtcaagtccagggtcagggtctggaaattcagcagcgcctcaaggcgcccctgagaaacttcgggttggtacggcgtatacgcggtgtaccagcctgggttttcgagcatgttacgcaggataaccggcgggtcagcaccgcgctatagcccataccgatgtaagatttgtagcgctggttctggctggcaatcgctttcagctcagccaacgcctgatgttcggttaccgcatcgccgacagccggggaccaggtaactggatatccgccgggacaatttgctggatcaaggcgttcagcgagctggcacctacggtctccagcatttgctgctgctgtgtagaagatggaccgatatggcggccaataaaggcttcgctgtgttcaagttggctgagagtctgagtcatttgctacgcattcctgaaatcttacattgaggtatcgagagctaactaaatcttgtgtgcatctatgtctgcacaaacaacagcaggatttctctaagtcattggcgctacagcaaggcggcaattttgaacagtccccggcagcttactcagtgagtgaccggggagaacaaacgctgccaacgccgctgtagcttcaagggcgacgagaaattcagtcttccagagtggcctgatatccagccgcatccagcagtgcatccagctcggattcgtcggaggctttaatctggaacaggaaaccttcgccgtatggctcgctgttgaccagctctggagaggattccagttcgctgttaacggcaacgatttcgccgctgattggcgagtagatgtctgaggcagccttcacggattcggctaccgcgcagtcttcacccgcttccacggtgcgacccacttcaggcaaatcgacaaacaccatgtcgcccagcaaaccctgtgcgtgctcggtgatgccgacgctgtaaacgccattgccttcagaacgcacccattcatgagaggtcgcgtattttaattctgctggaacattgctcataaataatctccgaaagagttttttaagttctaaataatcaataatttaaatgtgctttataccaggcttttgccgttacgcacgaaacccggtttggtgacgcgcaccggcatttcgcggttgcggatctgcaccactgcctgctcgccgatgcctgctggcacgcgagccagcgcaatgctgtagccgagcgttggagagaatgaaccgctggtgattacgccttcacgcacattaccggccgcatcggtgaaacgcaccggcagctcattacgtaatacacctttttcggtcataaccaaacccaccagcagatcggtcccttctgcacgctgtttttcgagcgcgtcgcggccaatgaaacggcggtcttcaggctgccaggcgatagtccaacccatgttggcggccaaaggggaaacgtcttcgtccatttcctgtccgtacaggttcatgcccgcttccagacgcagcgtatcgcgcgcgcccaaaccggctggctgtacgcccgcatcaagcagcttttgccagaaatcggcagcgtcttcctgcggcagagcaatttcgtaaccggcttcaccggtgtagccggtggtggcaataaacagagagccggcctgcacgccaaagaaaggcttcatgccgctcacggcctgtttttgctcctcgctgaacagcgtctgtgcgcgttcctgtgcctgcggccctgaacggctatcagcgccaggtcatcacgaacggtcagttcaacggagaacggcgcggcgtggtcggttatccactccagatccttatgacgggtcgcagagttaaccaccaggcggaagaaatcttcagtgaagtaataaacaatcaggtcatcgataacgccgccggactcattgagcatgccggtgtacagcgccttgcccggttgggtcagcttggcgacgtcgtttgccagcagatagcgcaggaactcacgggtacgtgcgccgtgcaaatcgacgatggtcatatgggagacatcaaacatgccggcgtcgcggcgaacaatatggtgttcatcgagctgggagccataatgcagcggcatcatccagccgtgaaaatcgaccatacgtgcgccacaggcgacatgactgtcatataaccgagtctgctttgtcatctttttcctcattcttttccgaagcgaattacccggctcctcgccggccttgcggccaactttcatccaagagccagtgcaagatctgtgccgacgcaaacgataccttttcctgaacgttatcaccgaatgaccctgctaaccataagttaaaatattcggtgttggctttttgtcaggaatttgcggaggctatgatgcagaatttttaactagaaaaatggggttaatgacgcaaaatctacaattaaatgaggaatcggtcgatgttatataacgcaggtgccgaatttcacgtcatttgcggttcgcaaaatccggcatcagattagaaaaagtaatggaaaaaatgggatgaaattagattatttcagctgaagctattgggtctggagccactcgggtaagtcgtttaatcccatcgcctgacgcagcagtttcggcttcacgcccggcagtgaatccgccagcgtcagaccgaggtcgcgcagcagcttcttggccggattgttgccggcaaacagttcacggaacccctgcatgcccaccagcatcagcgcagcgctgtgcttgcgcttgcgttcaaagcgacgcagatacatgtgctgaccgaagtctttgccttcacgctgcaagcgtttgatttccgacgctaactcggcgacgtccataaagcccagattgacccctgacccgccaacggatgaacggtatgtgcggcgtcgccaatcagcgccaggcgttgagcggcaaaactgcgggcatagcgaccggtcagcgggaacgactggcgctcgctgatgacctcgcacacgcccagacgcaggtcgaaggtgctggccagaaccttgttgaattcggcatcggacagcgccaacagccgctcggcctcttccggcgatacggaccagacaatagaggataaatgcgggtcggccagcggcaagaaggccagaatgccttcaccgtggaatacctggcgtgccaccgattggtgcgcctcatcggtgcgaatcgtcgcaaccagtgcatgatggcggtagtcccagaaggtcagcgggatgtccgcatgctgacgcagccacgagtgcgcgccgtcggcaccgaccaccagacgtgcactgagcatgcgtccgtcttcgagattgataaaggcttcgttctccccccaggcaacgtttttcagctgcgcaggggcaaagatttcaacctcgctgagctgctctgcacgctgccagagggcgcgaaggataaccgggttttcgataatgtgcccaaggtggctaaagccgaactcctcgctgcggaaggcaattttgccgaagctgtcgcggtcccacacttccatgccctgatagggattagcgcgctggccgataatgttgtcccaaacgccgatgtgttgcagtaaacgttcgctggcggcgttgacggcggagacacgcacgccgggaatggccggtaaaggggcgtcgtcgggcaggcgattttcgagcaccgcgatgcgcaggccactgccttgcaggctacaggcaagcgccagtccgaccatgccgccaccggcgataaccacatcaaaagattgcataatttaattcattcctgtcatttttctgcggtcaggctgggccttcgcaagcgccttcagcgttctgtccagcccagggtgcggcgggtaaaagcatcacgcagtggggagatccgctccatggccatcaggccaaggctgcgtcctgccaccagcggtgcataacgattggcgaatattcgcaccagcccgtcggtgatgccgacggttgcccgctgatcgggctgacgacgttgttgatagcggcttaatacctgataactgccgatgtcctgattttcttgccatgcgctggcgagggtttcgctcagcgtcatgacgtcgcgcaggccaaggttaaagccctgcccggctatcggatgcagcgtctgcgccgcattgccgaccagcgccagtcgatgactaatgtgcccgctggcggttaataattgtaatggataacagtggcgcgcgccggtttgctgcatcttgcccaaacgccagccgaacgcctgctgtagctcggacagaaactggtcgctgctccaggccttaacttcagcctgtttttcaaccggatgacaccagaccagcgagctgcgccctgtagacatcggcaacagcgccagcggaccgtgctcggtgaatcgttcgaaggcacggccctgatgcggctgaccagtcgtgatattggcgatgatggcaatctgctgatagctgtcgcggtgccagcgaatcccgcagtgctgggccagcgtcgagtttgaaccgtcggcggcgaccagcagactggccttaaggatttcgccgttgtcgagcgttacgctggcgctgtcggcgcggcgagtcacctcgaccacccgcgcaggacagtgcagatgtacgcccggcgcattcgaaagcagcgaaaacagccgctgccccgcgtcgtgaagctcaaccacctgccccagcgcctcaacgccataatgaccagcgttaaggttcacaaaactggcatgcccgcgatcgctgacgtgaatatcggtaatcggcgttgcgcagtttgccagtgcaggccagacgccaatggcatttagctgctgacaggtgccctgcgccagcgcaatcgcgcgcgcgtcaaatcccggatgggtataatcatcgggtgaggtgacctcgacaagatgcaccggcaggcgaccctgcgttagcgacgagacggccagcgccagcgttgctccggccataccgccgcccacaataatcatgctcatgggttatcttgccgccgccatcagtgcttcgatatcgtcggcctctttcaccacgtcgccggtcaggatctcgatgccgctttcggtaatcacgatatcgtcttcaatgcggataccgatgccgcgataggcctccggcacgtcagcgtcgggcgcgatgtacaggcccggctcgacggtcagcaccatccccggttccagcttgcggctgcgctctacggtgccgtagtttcccacatcgtggacgtctaatcccaaccagtgagacagcccgtgcataaagaactggcggtgtgcctgctcggcgatgagcagatcaacgtcgcccttcatcacgccaacggccaccagcccttcaaccatgacgcgcacggcggcctcggtcgcctcctgaatgctgcggcccggaccaaagacttccagcgccttgtattcggaggcgagcacgatgtcgtaaatctgccgctgtgccggggtgaacttgccgctgaccgggaaggtacgggtaatgtcacccgcgtagccctgatactcgcagccggcatcaatcagcaccaaatcgccgtcgcgcagctcgcactcgttttcggtgtaatgcaggatacagccgttctcgccgctgccgacgatggtgttataagagggggtacgcgagccatggcggctgaattcgtagtgaatctcgccttcgaggtgatactcgaacatgccagcgcggcaggtttgcatggcgcgagtatggcctttggcggtgatttcaccggcacgacgcatcaccgcaatctcctgcgcggacttgatcaggcgcatttcatgcacccagggacgccagtcggtaacggtggccggagcagataggttctgacgaaaacccttgcgcagtttttccatcgcacggtcaacaatgctgtcggcgtaggcataatagccctgcgcgtgatacagcacatcgaggccgttaaacagcaaatgaagctggtcgttgatagaatcaaacggcagcgcgcggctaacacctagacgcgccggtgcagcatcctgccccaaacgacgaccaaaccagatctcggcggtcaaatcacgcacgcgattaaacagcacgctgtgactatgattctcatcgctttttaccagcaccaacgccgcttccggttcgttaaaaccggtcagataccaaaagtcgctgctctgacgataagggtattcgctgtccgcgttgcgggtagcctcgtgcgcggcaaaaataattgccgcactgccgggtgccatcttggcaatgagtgcctgacgacgagcttcgtattcctgctgagtaatggtcactgtagtcatcacctgctcctgaaatcggatgttatccacgttaacttatttttttattgcttttttaaccgaatttggctgctttgcttaagcagggtatcagtgcagtgtgcgctgattttcaggcgccgtcggatggctgtgaccgaactcgttgaagcacagaatcgctgccacgcgaacgtattcgatgacctcttcaagtgactgtgccagcatttcctggtcttcgtcgtcttcataacccaactgggcaatgctgcgcagatcgtcaatggcttcaccgacttcgcctttcactttcgcaagcttaggctgcatcataccgaggcccagaaggaaatgattgacccagcctgctaatgcgtcagcgcgttcaaacacgctagcgtcgtcgcttggcatcagcatcttgaattcgaagctgtcgtcttccagcgtgtcggcagtgatttttcggagttgttgaagtgcatccgcgagctgatgactgaaggccattccttcgtttgtgaggtcgtgaaccagggtcagccagctgccatcacggttgccaccacagagtaagccactgataagcccatgcatttcagctggggtcagggcaacagactgctgtttcaggtattgattcagcgaatcatagcttggataggtattctcaatagacatgcgcattcgccatcgttggctggataagttcgtgttatgctaccaccaaggcaagtctcagtaccagattagctagctatgcgttggtgctaaacggcgttgcaaatctggagtgaggtatatatagttgcgcccgctttcgatgtcctgccggtttggcagtgagttaatcgggggccggcgaataatatggcaggaaggtggcatgtctgcacaaccggtagatatacaaatttttggtcgctcattaagagtaaattgtccgccagaacaacaagaagcgttgaacatggctgcagaggatcttaatcagcggttgcaagatcttaaagttcgcactagagtcacaaatacagagcaactggtatttatcgcggcattgaacgtctgtcacgaacttgctcaagaacgcttgaaaacacgcgattatgcctccaatatggaacagcgtattcgcatgttgcaacaaaccatcgagcaagcactgctcgaacaaggacgcatcactgaacgtgaaggggcgcctttcgaataagttaagctgttgatttatttcttattgtatgagacattaactctacagcagtacacaaaaatttctctgagatgtttgccagcgggcccgtcccctgagccgataattagtaccaacagaatgtgatgatccgcaatcggtgcgcatgctcggtccgccgagaagcctaaagattgtgactgaacgttcaccttgaaccatgggttcaagggttacagcctgcggcggcatctcggagattcccctttctttcccgcactctcttctttggttttttctatgtcctttacagctcaacacgcgctgatcaggcaagctattcgtactgaagtacgccagcgcagaaaacaacttacccagcagcagcaacagcagtttgccctgcaagcagcgcagcgcatcgccaatcatcctaaagttcagcaggctaaaacgctgtccgtttttctgtcttttgacggagaactcgacactgctccgctgatagaccgactgtggcaagagggcaaaacactttatttgccagtattgcacccttttacggtgggccatttgctgtttctccgctatcgtcccgagacaaagctggtacggaatcgtctgaatatccttgaacctgcactcgacgtgagagagattttgccgctcaatcagctgaacattatcctcacgccgctcgtcgcctttgactcactcgggcaacgattaggtatggggggtggattttatgaccgtacgttgcagcactggcgcgaaagtggcccttacccgataggtattgcccacgactgccagtgggtggacacattgccgagtgaggagtgggatattccgttgcccgagattttaacgccgagtaaaagctggcgttggccggattaacgccttaaccccgcaggttagtttcctcctccgctttgcactcccattcttcttataaatttaaagaaacctcttagccaagttagacgttttctatgtgttttatatagcaaaatcctcatcagattattgttacattatattacacagggaagtaagcatgaaaaaacactacggattaacatttgcagcactcgcggtaatagcctcgttcaatactgcaaatgctgatgatttatcggacaaaacagcagctttcatgttgcctaatattcaggccctatgtctagcagcagtgaacgagaaacaggtcagtttcttaagctgtcagcgcttctgcgcgataccgactcagtatcagtaaccgagttgtcggcatcctctacggcaacaatggccagggatgcgaagtataaagacgccgttgtatttaccggaaaaatgccgtcattaattcgctctgcagagtcaacggatatgattctggtgcttcgtgaggataaaagtttcctggcgatgtatcccgatcagcataaaatcatttacagcacgcccgcaggtgaacaaactcaaatcacgttcaaaaaacccattttttcccaagaagatacgctaatccccgccgttcaaggcgatgctttacaaactttagcacgagacggcagctccctttataagggagatattgataaagacggctatattgttatcgatgttcttgccggtttctcaaaagccgcagcgaaaacgattattgatcctgaagccttcgcgcttgctcagttaaccacagtcaatcaggctttaaaaaactcccgcattgaaaaaatacgcgtcaggctggtaggcacgcaaatcattgatcaggattactcgattactggtggtacgttatcacaaataaataaactgtttagtcagggcatgtccgaatatggtcccgacctcatcgctgcttttttcgaaggtaataatgacgatacggctatcggctgggcctacgtcaatggccgctacaacattaacgcgctctacgcttcaacttccctgcgccatgaattgagccataacatcggtggtaaccattgttggtcaggcagtggcgatcatcatggctgggacaacgataaaacccaaaccatacagtgtggtaacgatatcggctacttctccaatcccgatttgcaagacaactatggtttgccgatcggtgacaagaacaaggccaatatggcgcgagtctggcgagataatgcggcaaaaatctcgggctacaatccagcagtgatcccttttgatcacgaaaaatcgctaatgctggcagaacaaagcgttaagctgaaaaaatccaataattatctgcatcgtatcgaatttaacgtgccggccaatacccatagattggctgtcagtgccgtaccgggtccgcagcacgaagaaaccagccaatttagcctttatctcagcaaaggaagctggccttcggccaatgattacgactataaagggcgtgaagcatggaatacctctttgggtgtgaccaagcccgctgctggaaaatggcacttggcggttgcctctaaaaatacagcgatagatgatattattgttcgtgtacaagcctttaccgaatctggtgaagagattgtacccgatgaagtctctacctcgctgcaaaatgcgggcgcagaaaccggtaacctaagtggctggaaactgactcagggacaattccgcgtggtgaccagccaggacggtatcctgccagccaaagggaaatacttctttaccgcgagaatcaataatagcgcggccaataatgccacccatgaccaaataagccagagcatcgccttggacaagtctttagtcagtcagggtaatcacgttgccaaactgcaatttaagagcaatggttttggagatggtgattacggtacagtctatttgattgctaaaaatgcaaagggggcgacgcttaaaacggcgcaggtaaatactcaaggcctcaaaaaacgctggctgaataatacggtctcagttgacttaccagcacaggcaacgctactcgaagttcaagtgcaggcaacgaaaaaaatgggggtaacatcagacgtacattttgatgattttattctcaatatcgagaaaaaaagcaatgaaggagacgataatcagccagagaatcatgctccgactgccattgcaaaagccacgccagcagaaattaccggttcaggcagcgtcattttatcggccgtgggcagcagcgaccctgacggcgacagcctgaagtaccagtggagacagatatcttctggcccacaaattactctcaaaaatgctcaaaccattcaggctacagcatcattccccgccgtggaaaaacaaaccacctaccgttttaacgtcacagtgacggatacgcacggtgcaagtgccaccagtgaaactcaggttacgcaaaaacctgcggcaaccgcagacaaccctcaatggatatcctcaaaaacctatcctaagccctgtgtaaaagtatcttatcaggggaaacaatggatgaacggttggtggacggtaggcaatgtgccgggtgtcgatggtacatggggagtttggcgcgaaattggtgacaaaaatatgcacgctagctgtaaatagcggctgacttttttacagctgtgatattactgaaaaggggcatctctcgatgccccttttgccattcaaaaattaaaactgctcaaaattaatcagtaaagcagacgcgcgcgaatggtgcctgggatagccttcatcagctgtagcgcggtatcaacagtctcaatatcggcctcaacgtcgataaccacataacccacttccggactggtttgcagatactgcgcggcaatgttgatgccctgctcggcgaagatctggttgatgctggtcagcacgcccggacggttttcatggatatgcagcagacggctggctttctcgctgtgcgttggcagcgaagcttccgggaagttaaccgcagacagcgtagacccgttatcagagtatttggccagcttaccggcgacttccagaccaataccttcctgcgcttccatggttgaacccccaatgtgcggagtcaggatcacgttatcaaattcacacagtggtgaagtgaacggatcgctgttggtcgccggctcttccgggaatacgtcaattgccgcaccggaaagatgcttgctgcgcagcgcgtcgcacagcgcagggatgtcgatgaccgtgccgcgtgaggcgttgataagcagcgcaccaggcttcatctgcgccagttcttcagcaccaatcatgtctttggtgttagccgtttcaggcacgtgcatggtaaccacgtcgctggtgttcagcagttcggtcagcgtagggatctgctgcgcgttgcccagaggcagcttgctttcgatgtcgtagaagtaaaccttcatccccagaccttcggccagaatacccagctgcgtaccgatatggccatagccgacgatacccagacgtttgccgcgcgcttcataggagcccacggccagcttgttccagataccacggtgcgccttggcgttagccgccggaatgccgcgcatcatcaacagcatctcgcccagtaccatttcggcaaccgagcgggtattggagaagggagcgttgaatactggaataccacgtttagtggcagaggtcagattcacctggttggtaccgatgcagaaacagccgacggcaaccagcttttcagccgcagcaaagacttcttcggtcagttgggaacgggatcggatcccgacaaaatgtgcatcacggatcgactctttcagcgcttcagtatccagcgcccctttatgaaactcgatattggtataaccggcggcgtgaagcgtgtcgactgcgctttggtggacaccttcaaccagcagaaacttaattttgtcttttccgagtgatacttttgccatttcccgaccctactatttattcataccggcagtaacgaataccgaaagttattcatgctgaatgcagacttcagaagtcactgctttgcgcagctcacagtcaacataacaaaatttttgcgccgggcaatacaaacgattgcctatcccctagcacaagccctgactgacccaacaattttcagaacttaatacttacattgcgtgacgagctggatataaacgttaaaacggcctcattatgtgacataagtcaccaaattagccgttttaaataaaagatgattcatggggaaaattatcatcttcataacattgcattatgttatgagcgcaaaacagatctcacgcttatctctagacaggctattttacgactttaacaccgtctgccgtgcccaccagcgcgacgtcagccccgcggttggcaaacagcccaacggtgacaacaccagcgatactgttaatcttattttccagcgcgatggcatcaataatgctcagattgtgcacgtcgagaatgacgttgccgttgtcggtcaccacattctgacgatactccggcaggccacccaatttaaccagctcgcgagccacgtaggaacgcgccatcgggataacctcaaccggcagcgggaacttacccagcacgtcgacctgctttgaggcatcgacgatacagacgaatttgtgcgagatggcggcgatgattttctcgcgggtcagggctgcgccaccgcctttgatcatctgcatatggccgttgatttcgtcagcaccgtcaacatagacgtccagcacgtccacttcattggtgtcgaaaacgtggataccatagctcttcagcttggccgtcgaggcttcagagctcgacacagcgccttcgatttgatgtttaatcgacgccagtgcatcaataaagtgcgccgccgtcgagccagtacccacgccgacaatcgtgcccggcgtaacgtattccagcgctgcccaaccaaccgcttttttcaattcatcctgagtcatggtcatttttctctatcggtagacgatgcgtcttgaagtgttcattagtataaagcatggcccggataattggggagcagacttgtggccaacgggcagaagattttgtgcgccacaaaagttacagaactgtggcatagtgtctaaatatgcattaaatccgaacgagcgaaggaatagattttcgatgaaacgcccagactatagaacgctgcaagcgctggacgctgtgatccgtgaacgcggttttgagcgcgcggcacaaaagctgtgcatcacccaatccgccgtgtctcaacgaattaaacagttggaaaatttattcggccagccgcttctggtacgaaccgtaccgccacgcccaaccgagcaggggcagaagctgctcgcgctgctgcatcaggtagagttgctcgaagaagagtggctgggtaatgacaatattaacgacagcaacgacacgccgctgctgctctctctggcggtcaacgccgacagcctggcgacctggttgcttccggcactgaagtcggtactggttgactccccgattcgcctaaatatgcaggtcgaagacgaaacccgcactcaggagcgtttgcgccggggtgaagtggtgggcgcggtgagtattcaacctcagccgctgccaagctgcctggtggaccagctgggggcactcgactatctgtttgtggcatcgaaaggctttgccgagcgctatttcccgaacggcgtgacgcgctccgccctgctcaaagcgccggccgtcgcctttgaccatctcgatgacatgcatcaggccttcttacagcagaactttgatctttcgccgggcagcgtgccctgtcatatcgttaattcgtcagaagccttcgtacagctggcacgtcagggtacgacctgctgtatgatcccgcacttgcagattgagaaagagttagaaagcggtgagctgattgacctgacgcccggactgttccagcgccgcatgctgtactggcatcgtttcgcgccggaaagccgcatgatgagaaaagtcaccgacgccctgctcgaacacgggcgtcaggttcttcgtcaagactgaagattcaactgacaggggcgttaaccttctgtcagccgacatatttagcgttttaaacgtcttatttaggcgcgtcgccgttcttcagctcaaataccacgtcaacctggtcgtcaaagtgaatactctgctgctcgtaggtctgagcggcatcactttgcccggcggcgtcggccgttttatacattctggcgaccggcattggctggtagttagcgacgtgataacgaatgctatacaccgggccaagctggctgtggaagccttcggcgagcgccttggcctgctgagtcgcattatcaatcgctttctgacgcgcccgatcgcgatagctgtccgggttggcaacgcccagttcaacggcacggatctcgttgagtccagaacttaaagccccgtccagcagttcgttaagtttgtccagctgacgcagagtgacctgcacctcacgcaccgcgcgatagcctttcagcacgctgctgccgtctttcaggtagctgtaatcaggctgagtgcgcaggtttgcggcgttaatgtctttcttatctattccgttcttctgcaaaaacgcaaaatactcggccacgcgctggtcggcctgttttttcgctgatgcggcgtctttggcagaaacattgacttcaatggccagcgtcgcgatgtccggaacggcatcgacgctggcagtacctgaagttaccacatgcggtccctctggcacttcagcagcctgaagcgcagcgggtaaagtccctaatcccaacatagcggccatagccaatgctttcaatttcacagtgtttccctcattcatctgatgagcgacaaccctagcacagtcgttacgtagcgaaattaagattagtgacaaatttttagaaatgcaggttctgcaatgcaagctgtagggcaatcgcccacattacgaccccgaccaccagattgatcgcgcgctgcgttttgcctttgttcagccacggtgacagcaacgccgcaagcaccgccagcccgaagaaccacagcgtggaggaaagcaccgcgcccagcgcaaaccaggagcgctcatcgctggcgaggcgtcccccagactccccagcaccacaaaggtgtcgagatagacgtgcggattgagccaggtgaccgccatcatgctggccacgatgcgccagcggcttttctccatcactttcgcttcaacctgcaaaggattcgccgccatcgcggtacggaatgcgccccagccaaaccacagcagaaaggccacaccgcccaactgacgataaacaacagggttggatagttgtcgagcaacgcactgccgccaaaaataccgccgcagatcaggacaatgtcgctaaaagcacagagcccggcaatcatcagatggtactgacggcggatgccctgattcatgacaaaggcgttttgcgggccaatgggcaggatcatcgcggcgctgagcatcatcccctgcaagaagattgagaacatggtgaaaatttcctgttatgagtccaagaggtctatgcgccgcagtgtaagggagagtcatcattagatgaaattgtattttctaatagactattaggcaggctaatagcgcagattcatcaagcaaaacgccctgcgagcagggcgttttttagatagcagacagattattcggcctttgcagcctcttgctgctcggccgctttcgcttcggcggcgcggaacagatgcacgtccatctgcgggtagggaataccgatattattggcatccagcgcttccttgaatttctccagcaggtcccatttaacgttctgggaatcaccgttggcggtccagtaacgcaccacgaagtccagcgtcgaggcgcccatttcgttaagacggacgaccacgcccttctcttgcatgatgcgctcatcggcagtggcgatatcgcccagcaccttcttcaccagcgcaatttcggcgtcgtatgagacgctgacgatgatgtcagtccggctggtcggttcgcgcgaggtattgatgatgttcccggcgatcactttaccgttaggcaccacgataaccttgttatccgccgtcagcagtgtcgttgagaaaatctgtacatgcgttacggtaccggcaacgccgccgaggtcgacgtattcacccacgcggaactgacggaacatcaccagcaacacgcccgccgcaaagtttgacagcgaaccttgcagggccagacctacggccaaaccggcggcaccgataacggctatcacggaggtggtctgcacgccaatgcggcccaacacggcaatcagcgtaaaggcaataatcgcgtagcgcaccagtgctgccaggaaatcggaaacggtcaggtcgatattacgcagacgcattacgcgacttaccgtgccagagattaatttcgccgccaccaacccgatgaccagaatcaccacagcggccacgatattgaccgcataatggatcagcaattcctgatttttggctaaccacgtaccggcattatgaatgccatcaaccacatttatatcttccatttaacacaccctagcaagcaataatgaaaccaaacattcgcgctaaagcgcacaacgaatgatgcctaagccctcaagggtaaccaagatttcgccgaactgccaatctgcaccatcgctttgcgcgatttttaaacgttgcttaccggcttttcaaccgtccttgcaacaggtttaaaagcctgcagcggtcccctgccgctaagggtgaataccgacagcagcgtaaaggccagcgctatcaatccgaggatcagataagtgccgtggaaaccaatcttgccgtacatatcgccggcgaagacggacataaaaatcatcgcaatctgtttgaaaaagcagaaacagaccagatagatggttgccgagaaacgtacctcgaagaccgaggtgatgtatttgaagcagccgacaatcaggaacggcacctcgaacatatgcagcgttttcagcaccaccacctcgaccggtgtactggcaaacgaggagccaatgatgcggacagacatgatggtacccgcaagcaacagggcgttcttgccgccaatgcgattgacaatcagcggtgcgaagaacatcaccagcgcgttcagcaattcacccatggtggtgatgtagccgaatacccgcgtgccctcatcggcgctgctgaagaaggaggtaaagaagttagcaaactgctggtcgaacacctcataggtacaggacacgccgactacgtagagaccgaggaaccacagtttcttgtctttgagaagttccgccgccagacgcaggctaaaaggcttggagttggctcccagttcgttagccaccttagccgtcgctcccaccgcaggtttggccaccagcagcagtacagcgaggataaccgcgcagcctgagccgagccagaaaacaaactgattgttgatggtaaacataatgcccaccaccgaggcacaaatcgcccaaccgacgcagccaaacatgcgtgcacgaccaaactcgaagctgctgcgacgactgaccttttcgatataggcttcaatagccggtgcaccaccgttgtagataaagcctaaatagaccccgccaacaatcgagcccaacaggatgttggttttcaacagcggtccgaacacgtaaataaagaacggggcaaacatcaccagcataccggtgatgatccacagcaggtgtttcttcaggcccagcttgtctgatagcagtccaaacagcggttggaacaccagagagaagaaagagatgctggcaaaaataatcccggtatcactctgattgatatggttaatatcatgcagccagatagggaagaacggaaaataggcacccatgatgaaaaagtagaaaaagaagaacaacccaaacgtccagaaattggtattttttatgtagtacatctgaaactcctcggcctaaacggctgccctgccttgctgtttgcgtgcagacagggcaacgaacattacttacgcaaccagctcaatgaatagcgatactcaccggccgtcagcagatattccggactgacgctgggactccaggaatcatcgccaccaatccccatgcggaaggcatcgacgttcagccaggtgccctcctcttcctgcaacagatggcgatggctggtttccatcagctgactcaggccaaagcggctcaccccaaaggcgaagtcaccgcgcaacgtccagtggccgtaattcagctcacgagtcccgccgcgtgaaccgttttcagaaggaaatacgtaaggggtgtagagtgcctccagcgttagctgccagcgagagaactgcgccgccagctgcctgtcgggatagttctcgtgcggtccgagacccagccattcggctgatgcggcaacctctcgcagctgacaggtcaggccgatacgcgccggtgacggcaaatcgcttgccacctgaacccgtgcgtcgatatgcagttcgccctgcgtcccaatgcgataagttttgcggctaattagggcgaccttgttgtcgttaaggaaggcgtgttcggtttcaacgatgaccgcttcggccagacgattgacctcaagatgcagcagctggctttccagcgcgtacattccggccttcttccaacgctcaacccaggcgttagggtcgatgcgggtggcttcgctcacgccaatatcgttatccagcggtgcgcggacaaactggtcacagagcggtgtcagcagctgcggctcttctccctgccaccactgttcgagcaggccggtttttgcgttgaactgccagcgctgaccgccgtgagtgataatgatgccatcgtcgctgtgcgttaaccccggtgcactgccctgctctggtgaaatctttggcaagctcagcgcgcgcggcagcgtccactgatgccaggcgctgcgatgtccggcgtctgaccacgcggttgcctctggctgcacaatgtcaatattcagccacagttcaccggccttgctgaccgcagggatatcacccagcgtaatgcgctggcggccctgcggcgcgatatccagcgccacctcgccgtaactcagcgcttcaccgttcagctcaatgcgccagttcagactctcgttgtcggttcggcggaacagattgtcgttatggatttccaccaccagcggatgatgactcaccagctcaaaatggaagaactgctgggcacgctgcgcctcgaaaagcgccggatggggggttcggtcctggaataccagaccgttcatgcagaactggcgatcgtttggcttgtcgccaaaatcaccaccgtaggcccaatagctgacgccatcgtcgccggtgcgggtcaggctctggtcaacccagtcccaaacgaatccgccctgaagacggggatggtcgcgaaacgcctgccagtatttgtcgaaaccgccgaggctgttgcccatcgcatgagcgtattcgcagaggatgagcggacgcgtctcgtccggcatgccgatccactttttgatagaccacttcggcaccgcgtcaaaaggctggtcctgatctacgcgggcatacatcgggcagataatgtcggtcgccgcggtattggctccccgccctcatactgcacagggcgactcggatcggtggattttatccagctatacagcgcgtcatgtgtggaaccgtggcccgactcgttgcccagcgaccagatgatgatgcaaggatggttgcggtcgcgctgcaccatgcgggtgacgcgttcgctaaaggcgttaaaccactgcggatcatccgacagacgattcatcggctgcatgccgtgcgtttcaatgttcgcctcatcgaccacgtacaggccgtagcggtcgcacagcttgtaccacagcggatggttcgggtaatgggagcagcgcaccgcgttgaagttatgctgcttcatcaacaggatatctttcagcatggtcgcttcgtcgatagcctgccccttctcaggatgatgctcatggcggttggtcccgcgaatcagcagcggctggccgttgagtttgagcagcccctgactgatttcaacctgacggaaaccgacgtcaaaggcctcggcctcaatcagtgtgttatccgcatcaagcagggaaatcacggcgcgataaaggttcggttgctcggcgctccacagcaggggcttgctcaaggcaaggcgcagcgtgaccttatcaaagtaagccccgcgttcgtcgatagtttcgctgcccagcggctgaacctcttcgccgacacgccgatcgccgtgccacagttcaacctgcaccttcagagcggcggcgaggctggccgatgtccgcaccgacatcttcgcctcgagttcacccagcaggtaatcagcgtgaagaacggtgcgcagctgcacgtcggtcagttgaactgctggtttatgcagcaggctgacgtcacggaaaataccgctcatgcgccacatatcctgatcttcgagatagctgccgtcgctccagcgtaaaaccatcaccgccagacggttgctgcccgcctgcaaaaagttgctgaggtcaaattcggccggtaagcgactgtcctgtgaataaccgacccactgcccgttgcaccaaagataaaaagccgagttaacaccgtcgaagatgacacgcgtctgcccctgttcacgccaggcttcctcaacctcaaatgtgagcgaataacacccggtcggattttcctgcggcacaaacggcggattcaccgggatcggatactgaacgttggtgtaaattggcgcgtcatagccggccatttgccagtttgacggcaccgtaatggcgtcagcgtttggcaggtcggcgtcgagccaggtcactggcaccgattcgggagcgctgaaatagctgaacgcccactggccgttaaggctccgcgcgcttgttgaaggcttgtccaacctggcctcggccgtatcgcgccagctttgaaacggtggatgcgcaggcaggcgattgacctgagtgcagaccgggttttcccagtcacgccgcgccaataccgcgcttaaccgatttgtcgcctgttctgtatcaaccttcattgtcactccccgaaaatgttatgcgctcacattaatgtttttaaaatggggggagaggcagattaagtaaaggagccgagattcagaaggcgacgaggatcacaatttcaagcgcagatccgcacgcgttggctcaaagttgctccaactggcgggcgatgcgttttaattccagcgccagtgactgagcagagtccgccgtctcgccggggcagaggtggtatcgcgcagcatgagcgtggtgttgagcagcagtgagtcaggcgtcgcctgctgcggattttgcagcatctgcaccatacgattgacgctctcacgaccgctgaggcggaaatcttgcgcgatagtggttaacggcggctgaaaataggcgctgtcttcagtgtcatcgtaacccaccacggaaagctgctctggcaccgatatcgcagactgatgcgccgcacgcagcacccccagcgccatttggtcgttggccaccagaattgccgtgggccgctgcggctgattgagcaggctcatcgccagctgatagcccgacgccgagctccagtcgccgtgcagcacggcgaaaggctcaagcccgtgactcgctaacccacacagccacccctcgtaacgcaggcgcgccgaaaccgactccagcggcccagtcagcaaagcgatttgacgatgcccgagcccaataaggtgttcgacaccctgcctcgccccttcgttgggatcaaacaggatactcaacagagaagcattcgggtcgacgtccagaaatagcaccggcagattgccgcaggattgcttgaccgccaacgcgctgtcggtttccagcggtacgttgacaaggatcccatcgacccgctgggcgataagttcattcaccgcggcacggcaagactggagatccaggtcttccaccatcgagattaccacatgatatcccagttggctggcgcgcgtcttgatggccgacgccccctgtgaaggcgcgttcaaggccagatttgtgctcgccagacctaaggtaaagctctgtttccccgccagctgttgcgccatccgattgggcacataattcaacgcgttcatcgccgcctcaacgcggacgcgcgttttttccgagacctgtgcagcctgattcagcacgcgagacaccgtctggtaagagacgcctgcgtggcgggcaacatcatcgagcgtaacggattttggcttgttcaacggcggttatcctgacgggttgagttacaaacaagggtcgagacacgagctaagtcatcggactgatgataacagatttctgaggcggctgacgcgcacgcgcggatttgcacattgcggtgcacccttatggttcatatcagtcaccagagaggcattaaccgctcaatccgtgcacgaaagcgctgtaaaaagcgcaacattaggatgctaaccgtattgtatgcatagcctgtgaattaaccacaaaaataattaactctatttatcatgcagttgaataaaattcgacgttaaataatccgtcactggcccaggaattgctattcctcatgcagacaactttttacacctttggggaaaatgcatggacaaccataatcagtcagaaggtcagctgcaaagaggcttgaaaaaccgccacattcagctgattgctctgggcggcgcaatcggcaccggcctgtttctcgggatagcacaaaccataaaaatggcgggcccttccgtgctgctgggctacgccatcgctgggattatcgccttctttatcatgcgccagctcggcgaaatggtggttcacgaaccggtcgcaggctcgtttagccacttttccaacaaatactggggcactttgccggttttgtttcaggctggaactactgggtgctttacgtgctggtcagcatggcagagctcaccgccgtcggcatctacgttcaatactggtggcctgaaatcccgacctgggtctcagccgggtcttcttcgtcgccattaacgtgattaatatgaccagcgtgaaaatctacggtgaagtcgaattctggttttcaataatcaaagttgcggcgattatcggcatgataggttttggcgcatggttgctcgccagcggacacggcggacctgaggcaagcgtagcaaacctgtggcagcacggcggcttcttccctaatggaatcaagggactggtgatggcgatggccgtaatcatgttctcatttggcggtctcgaacttatcggcattaccgccgccgaggccgataacccacagaaaagcattccgaaagccaccaatcaggtgatctaccgcatcctgctgttctacgtgggcgcgctggcagtcctgttgtcactctatccatggcagaaagtcgtcgaaggcggcagtccgttcgttctgattttccacgcgctcaacagcaatctggtcgcaacgctgctcaacgccgtcgtgctttccgccgcactttctgtttataacagctgcgtattcagcaacagccgcatgctgtttggcctggcgaaacagggtaacgccccggcctcgctgttaaagattaaccgtcgcggtattcctctgaacgcgctcagcgtctcggcgctggtgacggcgctctgcgtattgctcaactatctgatgccgggcaaagccttcgaactgctaatgtcactggtggtctcggcgctggtgatcaactgggcgatgataagcgttacccacctgaaattcagccgcgccatgcacgctgccgggcaaaaaacgcgctttgcaagcctgggctatccgttaaccaatatcctttgcctgctgttcctggccggcattttggtgattatgtttatgacgccgggcatccagatttcggtgtggctgatccccgtctggctgctggtgctggcgattagctatcatttgaagaaaaagaaaaacagcgtcacgacgggcaagattgtagaaaccaataacctctgagacagggacaaaatgaaaaaattattaccttgggtattgctggttgccgccgggagcgccagtgcagaatcgcatctacaaacggtggtaaaacagggcgcgttaaacgtctgcactaccggcgactacaagccttatacctttcttaaacccgacggcagctatgaggggatagatatctcaatggcggaatcgctggcgaagagcctgggtgtgaaggtgaactttgtaaaatcgacctggaaaacgctgacacccgatctggtcgcgggcaaatgcgatatcgcgatgggcggtatttcggtcacgctggcacgtcagcagcaggcattttttgccgagagaatggacgtcgatgggaaaatcccgctagtacgctgcaccgacgtgaaaaagtatcagactctcgaacagatcaataacccctcggtacgcgtgatcgaaccggcgggtggcaccaatgaggcgttcgcccatgctttcctgccgaaaagtacgctgacgctctctcacgataacgccgggatcttccagcagttggtcgataaccaggccgatgtgatggtgactgaagcctcagaggcgctgtaccagaagaagtcgcacccttccctgtgcgcggttaatcctgacaaaccgatgcaatacggtgagaagtcttacatgctgccaaccgatgacattagctggaaactgtatgtcgatcagtggcttcatctggcacgcgccaccggcgaatatcagaagatagtcgccaactggatgtaaacggaccggttatcagaggcataaaaaagggcccctcaagggcccttttgttttttcttgcctgagcggcatgaaaagtcagtctgaattacagacggttaacgtcgttcagctcttcgaaagcctgttccagacgggtcaccatagaggactgagcagcgcgcagccatacgcgtggatcgtagtacttcttgttcggcttgtcagcgccttcagggttacccaattgcgcctgcaggtaagcttcgttctttttgtagtactgaagaataccgtcccagttagcccactgagtatcagtatcgatgttcattttgataacaccgtagctgatggactctttgatttcggcagcagaagaacctgaaccaccgtggaacacgaagtccagggagttgtgcggcaggttgtgtttcttgctgacgtaattctgagagtcacgcaggatggttggagtcagtttaacgttgcctggcttgtacacgccgtgaacgttaccgaaggacgccgcaatggtgaagcgtgggctgatagcgttcagtttttcataagcgtaatcaacgtcttctggctgggtgtacagcgcagaagcgtccatgtggctgttgtcaacgccgtcttcttcaccgccggtgcaacccagttcgatttccagcgtcatgtcgatcttggccatacgtgccagatacttgcttgaaatctcgatattttcttccagtgattcttctgacaggtcgatcatgtgagaagagaacagtggtttaccggtcgctttgaagtgtttttcaccttcgtccagcagaccgtcgatccaaggcagcagtttcttcgctgcgtggtcggtgtgcaggataaccggcacgccgtagtgttcagccatcaggtgtacgtgacgtgcgcctgagatagcgcccagaattgccgcgccctgtggcacatcagttttcagacctttacccgcgataaacgcagcaccgccgttagagaactgaataatgattggacctttcactttcgcagcggcttcgagagcggcgttgatggagtcggtacctacacagtttactgccgggagagcaaacgcattttctttagctactgcgaatactttctgaacgtcatcaccagtgataacaccaggttttacgaaatcaaaaattttagacatattacgttgtcctgtatcgtcggtcgtagatggattgaatcggattaaaaaatatagcgtgggcagacgagcaacctcatctgccctggattattactttttagcacgctcttccagcatcacaacggctggcagctctttcccttcaacgaactcaaggaaggcgccaccaccggtagagatgtaggagattttgtcggcaataccgaacaggtcgatagctgccagcgtgtcgccgccgcctgcgattgagaaagcatcgctatcggcaatggcgtgcgccacaatttcggtccctttacggaagttagggaactcgaatacgccaactggaccattccacagaatggttttggcgtttttcaggatctcggccagacgctgtgcagacacgtcgcccatatccagaatctgctcttcgtctttgatatcgctggtagatttcagggtagcggtcgcggtttcagaaaactcggttgctacgcgaacgtcggttggaaccggaatatcacaggtcttcagcagttttttggcggtgtccaccaggtctgcttcgtacagtgatttgccgacattatggccttgcgccgccacgaaggtgttggcgataccgccgcccacgatcagctggtcagcgattttggacagagactcaagaacggtcagcttggtagaaaccttagacccgcccacgatagcaaccattgggcgcgcagggttgcccagcgctttgcccagagcttcgagttcggcggacagcagtggacctgcacaggcgattggcgcgaacttgcccacgccgtgagtcgatgcctgagcgcggtgcgcagtaccaaaagcgtccatgacatacacgtcacacagcgcagcatattttttagaaagcgtttcgtcgtctttcttttcgcctttgttgaagcgaacgttttccagaacgaccagctcaccctcagcaatatcaacaccgtcgagataatctttcgccaggcgaacttttgaacccagcttgtctttcagatagttaacaaccggcagcagagaaaattcttcgttatattcgccttcggtaggacgacccagatgcgaggtcaccatcacgcgtgcaccctgcttcagggccgtttcgatggtaggtaaagaggcacggatacgtgcatcggacgtcactttaccgtctttaatcggtacgttaaggtccgcacggatcagtacacgctttcctgctaaatccagatcgctcatcttaattacagacatggtgaatcctcttctcgttgattctttttaaagttgcttgagggccgaccagccgtggctgatttgccttactagaaaccgcttgcggacatcgccaacgtcgtgtccaacatcctgttggcgaaaccccactcattgtcgcaccagaccagagtcttaatcaggcgctgaccactgacccgagtttgcgtaccatcgacgatggcgctatgcgggtcatggttaaaatcggtagaaactaatggtagttcggtatagtcaacaataccacgaaatgcaccattcgatgccttttgcagcagttggttgacctgctcaacgtcaaccttttcggaaacaaaaacgctcaggtcgatagcggtaacgttgatagtgggaacacgcaccgaaatcgcctcaaagcggtcacaaaacttgggcatgatgcgggtaattccggctgacagtttagtatcaacaggaataattgactgactggctgcgcgggtacggcgtaagtccggatggtaggcgtcgattaccggctggtcatgcatcgcagagtgaatggtcgtgactgtgccgaattcgatatcgaacgcgtcgtccagaagtttgataatgggaataatacagttggtggtacaggaggcatttgaaacgatgcggtgctcacgttcgagcaggtgatgatttacgccgtagacgacggtggcatcgaggtcatgtccgccaggatgggcaaacaggatttttttcgcacccgcggcaagctgggcctcccgtcttgtcgactgccgaacacgccagtgcagtcgagcaccacgtcaatgctcagttcgccccaggggagttggctggcgtcgggctgatgcagcagtcggatggtgtcgtcacctacggagagcacatcaccttcctggcgcacatcccatgcgaaacggccatggctggagtcgtatttcaacagatgtgccattccttcagggctggcgagttcgttgattgccacgacgctaatttctgcacggcgaccagattcgtataaagcgcgcaatacgctacggccaatgcgaccaaagccattaattgcgatacgtattggcatacttctccctgttacacggttgttacctaattacgataaccctatagtaatgcagtgcgcctttgcggtgaatcatcattgcacctgattggctgcaattcagaacgctataccccaacaacattcaaacacgtttacgactatcctgcgacgttcgccaaaataaccctaactgaaacggttcagccgagcataaaccaaactttgtgcaaaggaaatatttcggtgcaatttgacgcactcccgcatgcgattgatgaaaaaaacgcctgattattccttttttttcctaacgtgggcgttattttattaaaaagcttttgtggagggtttgatgcaaatcagagggagagttttttattgcaaaaattttggagcgagagtcgccctgggcttttcttaaaaatcaatttttaggaagtaaaggatagtgtcttaaatggcaatttttttttgttagaggcacatgccatggaggctggatgctgcactggagctgcttttgggatttatggggcagcggccctgatccgcttttgcggttaaagtcttttaaggtcaaaagcacgtgccttgcacgctgggcgctggcccagaccagccaagggccttcccaggccaaggcccttggaaccccagccttgttatctttgcatgtgtcttgccagccgatgagtttgtttcagatgcttgcgcacgtggcgtaggccgcgccgcttcgcggttccccgtctcggttccgagccaaacgcgtctcgtcacgcttcgcccggcgcagccccgaatccgccaacaatcctcttaaacaaaaaaccggcaaccttgcggtcaaatccacgcacggtcagaccaaaattctttgtgtttttcaaatcggaaaagcgcctcggagttaaagggcgttgacctcaaggcaggttaggcagccgcccgatcaccgccgcccccccaggccgtgcgcccagcacaaaaaaagccccggttttcaccgaggcctttatcactgccttaaaaagcaattttgcaataaaaagtaattacttaagaagggattgcgccttcgcaacaatattatccaccgtgaacccgaactctttaaacagcaggtccgcaggcgctgactcaccgaaggtggtcataccgacgattgcgccgttcaggccaacgtatttgtaccagtagtccgcgatacccgcttcaaccgcaacgcgcgcggaaacggctttcggcagcactgattcgcggtaagcggcgtcctgcttgtcgaacgcgtcggtggacggcagagagaccacgcgcactttggtgcccgccgcggccagcttgtcggccgcttctacagtgatacccacttcagaaccggtcgcaatcaggataacctctggcgtaccttcgctgtccttcaggatatacccccgcgcgccacgttcgccagctgctcggcggtacgcggttgctgggtcaggttctgacgggagaagatcagggtcgtcggaccgtcgttgcgctcgatagcgtatttccacgctaccgcagactcaacctggtcggctggacgccacaggctcatgttcggggtcacacgcaggctggccagctgttcaaccggctggtgcgtcgggccgtcttcgcccagaccgatagagtcgtgggtgtaaacaaacacgttgcggattttcatcagcgcggccatacgtgcggcgttacgcgcgtattccacgaacatcaggaaggttgcggtgtaaggcaggaaaccgccgtgcagcgcaataccgttgctgatcgcggtcatgccgaactcgcgcacgccgtagtgaatgtagttacctgcgttatcgtcgccgatagaacgtgagccagaccacatggtcaggttgctcggtgccaggtcagcggagccgcccaggaattccggcagaaccttaccgaaagcttccagcgcgttctgcgatgccttgcggctggcgatgttagcgggcttggcctgcagttcttcaatgaatttctgagactgcgcttcccaatcggccggcagcttgccattcacgcggcgttcgaactcggcagccagttctggatgcgctttcgcataggcggcgaacttcttgtcccaggcagactctttcgcctgacctgcttctttcgcgtcccactgggcgtagatctcctgaggaatttcgaaggcagcgtatttccagccgatggcttcgcgagtggcggccacttcggcagcacccagcgcagcgccgtgcacttcatgtgtaccggccttgttcggtgaaccgaaaccaatgatggttttgcacatcagcagtgaaggtttgtcggtaacagcgtgtgcttcttcgatagccgccttgatagcaaccggatcgtggccgtctacgtgacgcacaacgtgccagccgtaggattcgaaacgtgccgcggtatcgtcggtgaaccagccttctacgtggccgtcgatggagatgccgttgtcatcgtagaacgcggtcagtttgccgagcttcatggtaccggcgagtgaacaggcttcgtgcgagataccttccatcatacagccgtcgcccaggaaggcgtaggtgtggtggttgacgatatcgtggttttcacggttgaactgcgccgccagggtgcgttctgcaatcgcaaagcccacggcgttcgcaataccctgacccagcgggccggtggtggtttcaacgcctggggtgtagccgtactccgggtgacctggggtcttggagtgcagctgacggaagttttccaactcggtgataggcaggtcatagccggtgaggtgaagcaggctgtaaatcagcatcgacccgtgaccgtttgacagcacgaagcggtcgcggtcggcccagtgtgggttggtcgggttgtggttcaggtaatcacgccacaggacttcggcgatgtcggccatgcccataggggcaccagggtggccggaattcgctttctgcacggcgtccatgctgagtgcgcggatagcgttcgcaagctctttacgagaggacatgttctactccaggtcggattaaaaaagcagtcgaaaaaatcattttctcagactacgtattaaaacggcaatctctattactgcacgggacacacttcagaaaacaagcgctttgggcagagagtgtttagtctacccaactatatcgccccgctgttaaaaaccaatcacggcacacggcttataaggagatgttgttttcgctgcggttttataaatatcggtgcgggatcgagacagaaagaaacaaaaagacccggcaatgccgggtctcgtgtacgtgttagtcagaaggttaaaacgcttacgcgccttttttatccgcctgcacgtgaagcatttccagggccagcgtcgccgcggccagcgcagtgatgtcagactggtcgtaggctggggcaacttcaacgatgtccatacccacgatgtcgaggtccagattcttcaggccgcgaaccagcttcagcgcacggtcagaggtcaggccgccgatcactggcgtaccggtgccaggcgcgtgcgccgggtccagacagtcgatgtcgaagctcagatacaccggcaggtcaccaacaatctgcttaacctgcgccaaaatatcgtcaacggtgcggtcattgacctgagcggcgtcgagaacggtgaaaccgagatctttgtcgaactcggtacggataccaatctgcaccgagttctcggcagagattagcccttctttcggcgcatgatagaacatggtgccgtggtcgaatttgctgccgttggagtaggtatcagtgtgcgcatcgaagtgaaccagcgccatcttgccgaatttcttgaagtgcgagcgcagcagcggcagcgtcacaaagtggtcaccgccgaaggacagcatgcgtttgccggaggccagcagcttgtcggcgtgctcttcaagattgttgaccaagctctgtgcatcaccgaactcgtaaactacgtcgccgcagtcaaccacattcaggcgctcacgcaggtcgaaatcccacggccagcgcttgccttcccacgccagattgacggatacctgacggatagccgccgggcccagacgcgaacctgaacgaccagaagtcgccatgtcgaaaggaataccggtgatcacccactcggcatcgctgtcgtacggttcgaaattaaccgggaaacgcagaaaaccaaacgcgttggaaaccagcgagttatcaaacttatgtcccaaagtgctcatgacttatccttatataaagcctcgcacgagcgatgttcggcgaggctgttcttaacttattcgtcttctaagtaggtataaccgtagagaccgctctcgaactcttcgatgaactgcagctgcaggtcggcgtcgagatcggtttctttaacctgatcgcggaagcgggccagcagtacgttcgggtccaactgtacgtattcgagcatgtcggccacggtgtcgccttcgtcagactgctggacttcgatggtgccgtcagggaagacaaacacgtctaccgcagcagtatcaccgaacaggttgtgcatgttgccaaggatttcctggtaagcaccaaccataaagaagcccaacgctggaggattttccggatcataaggcggcatcggcatggtcgttgctacgccgtcgccgtcaacatagtggtcgataatcccgtcggagtcacaggtaatgtcgagcagcacggcgcggccaaccggtggcttgtcgaggccttccaacggcagcaccgggaacagctgatcgataccccacgcgtccggcattgactggaacagcgagaagttaacgtacagcttatcggccatgcgttcctgtagctcgtcaatgattggacggtgcgcacggttgctcgggtcaagctgctgctgaatcatgttgcagatattcaggtagatctcttccgcccaggcgcgctgagtcaggtccagaataccgtgcgcgtactgcgagtgaacgtcgtgcaggtccatctggcagtcgtgcagccactcacgcagcgaacgacggttttcaggatcgtgcatctcgttccaggtatcccacatgctcagcagcgcgcgcggggcatcggcagcaggggcaactggcggagtaaactcgttgcgctcaacgccgataacgttggacaccagcacggtgtggtgcgcggtaaccgcacggccagactcggtgatgaccgtagggtgcggcaggccgtgttcgttacaggcatcaccaataccccagataacgttgttggcgtattcgttcaggccatagttgaccgagcaatcagactgggaacgagtcccttcgtagtcgacgcccaagccgccgccgacgtcgaagcactgaatgttcacgccaagcttgtgcagttcaacgtagaaacgcgccgactcacggacgccagtggcgatgtcgcggatgttggccaactgcgaacccaagtggaagtgcagcagttgcaggctttcaagacgccccgcttcgcgcagcatctcgaccagttgcagcacctgtgccgccgccagaccgaacttagatttctcgccgccgctcgactgccacttgccggaaccctgagaagacagacgcgcacgtacgcccagacgcgggataacgttcagacgctcggcttcttccagcaccagcttaatctcgctcatcttctcgatgaccagataaaccttgtgacccagtttctcgccaatcagcgccagacggatgtattcacggtctttatagccgttacagacaatcaccgaacgggtcataccggcgtgcgccagtacggccatcagctcggctttagaaccggcctcaaggcccagcggctcaccggattcaaccagtgattcgatgacgcgacggtgctggtttaccttgatgggataaaccaggaaatagtcaccctcatagccaaatgattcgcgcgcgcgtttaaacgcggcgttaatcgagcgcagacggtgttgcagaatttgtgggaaacagaacaacgcgggaagacgttggccgtcctgttcacgcatgtctttaaccagctgggccaggtctacgcgggccgcaggcacgtccggatccggacatacgctaatgtggccaagctcattgacgtcgtagtaattgttaccccaataggcaacattgtaagtgcgcagcattttgctggcatcacggtcgttcacggcaacctcctgcatggagcgcaaagaaacactgtcgcccgcatgagacggacggtgggactgcatgtcatcagacatagttaatacccttttctacactgacagcatggccagccactatcgcagtaacaacaggtgagaacaacccagacaaagccgagaaacgccgaacaaaattcggtgcctcaaccctatagcaaagttgatcactcatataattgtaaatcacgttgtcagactccgtgaaacgagtcggagaaaccatgggacacacgccccaaaagtcgcaggctacatcaaaattttttcaggaaagggcggttaaccggccctggaatcttgagtagcgccaaaatgtctgtcgctgacctgtctatatacatgcggtgtagagacacgctgtttatagcatcggatagatgacagaattttttcacagtggtgggacgcagaaattaaatgcgtctgctgaggatgctgttgaaatgtaacaagcggtaaaaagtgggtcattaacctaaccacctccacaggtgccacgcaaatcatgcggacatccggccatatagggcataaagagaacagtaattactggaatacgctgcgtaaatcgcttctgaatgaaacatgccagcgcgggggcgtttataccgagaaccctgtaaaaatgcaaaatgaaaataaggtgaaagctgtttcgaacagtgaatatcacgcaaatccggcacaatatgaatacgggtgcagtaaaaaagggctggcaatcacctgacaagctagcctaaaatagccatccagatgttaatccgtctactctgacccaccgtcaaacggcttcagggatgggctcaaaatctgtcctattttcaagctgcctgtttggcagcagtctctaaccgtcgtatgaaaggtaaagaagataatggctaaacacctctttacgtccgaatctgtttcagaaggacatccagacaaaatcgctgaccaaatctctgatgccgttctcgacgcgattttagaacaagatccaaaagcgcgcgtggcgtgtgagacctacgttaaaaccggtatggttttagtgggtggcgaagtgactaccagtgcgtgggttgatatcgaagaaatcacccgtaataccgtgcgtgaaatcggctacatcaactccgagatgggcttcgacgcgaactcttgtgccgtgttgagcgctattggtaaacaatctcctgatattaatcagggtgttgaccgcagcgatccgctggagcaaggtgcgggcgaccagggtctgatgtttggttatgcaaccaacgaaaccgacgtgctgatgccagcaccagttacttacgctcaccgtctggtgcagcagcaggccgccgtacgtaaatcaggttcactgccttggctgcgtccagatgcgaaaagccagatcaccttccaatatgacgacggtaaaattgtcggtattgacgcggtcgttctgtcgactcagcactctgaagacgtgaatctgaaagacctgcaagaagcggtgatggaagagataatcaagccagttctgccgagcgaatggctgaatgcttcgaccaaataccacattaacccgactggccgtttcgttatcggtggcccaatgggtgactgtggtctgaccggtcgtaaaatcatcgttgatacctacggcggtatggcgcgccacggtggcggtgcattctctggtaaagacccttcgaaggttgaccgttctgcggcctatgcagctcgctacgttgcgaaaaacatcgttgctgctggtctggctgaccgttgtgaaattcaggtttcttacgctatcggcgttgcagaaccgacttccatcatggttgaaaccttcggtaccgagaaagtgcctaccgagcaactgaccctgctggtacgcgagttctttgacctgcgtccctatggcctgattcagatgcttgacctactgcacccaatctataaagagacggctgcatacggtcacttcggtcgcgaacatttcccatgggaaaaaaccgacaaagccgctcagctgcgtgaagctgccggtctgaaataagtttgggctaatcgcctgaatgagaaagaaccctgccctagtggcggggtttttttatatttgaaggtctttcggaatcgcctcaaaatgaaagcggttacagattataagttcttacgaattagataattacagcaatagtaaataacagttaaacaacaattgattgctttaaatcattggatatactaaaacctttaaccgctaacgcgcccacctaaacaaagtattacaaaagctcgccaatatacgtttctccacctcggaataagtgtaagcgattacaacactgtgatctggcgcactttttggggctttaagggcaaataacatatcaggctaagcattattgtcattttggaggcaggatgagtatctcaacgtcatataaggcagagaagcgctctaataagagtgtgactttttttgtctgttttctcgccgcattggctgggctgctattcggtctggacatcggcgtaatcgcaggcgcattaccctttattagtcacgattttcagatttccagccacgagcaggagtgggtggtaagttccatgatgttcggtgcagccgtaggtgccgtaggcagtggctggatgaacttccgtattggccgtaagtatagcctgatgatcggtgcggtactgttcgtgctcggctcgctggcttctgcattggcgcccaataccgaagttttgattatcgctcgcgtgctgctgggtctggcagttggcgtggcatcttacactgcgcctttgtatctttctgaaattgctccagaaaaaattcgtggcagcatgatctccatgtaccagttgatgattaccatcggtattctggcggcctacctttccgacaccggcctgagctacaccggctcatggcgctggatgctgggcgtgatcaccatccctgccctgctgctgctgattggcgtattcttcctgccagacagcccacgttggctggcggctcgcggtaacgacgagaaagcgcgtcgcgtactcgaaaaactgcgtgatactagcgagcaggctaaaaacgaactgaacgaaatccgcgaaagtctgaaggtaaaacaaagcggctgggcactgttcaccaacaacaaaaacttccgccgcgcggtttatctcggcattctgcttcaggttatgcagcagttcaccggtatgaacgtcatcatgtactacgcaccgaaaatcttcggtctggccgggttcgcaagcaacgccgagcagatgtggggcacggtaatcgtcggtctggtcaacgttctggcgacctttatcgctatcggtctggttgaccgttggggccgtaaaccgaccctgattctgggcttcttggttatggccgtcggtatgggcgtgttgggcacaatgctgcacgttggcgtcgaatccatgggcgcgaaatacttctccattgcgatgctgctgatgtttatcgttggctttgcgatgagtgcgggtccgctgatttgggtcctgtgttctgaaatccagccgcttaagggccgcgattttggtatcaccgtatcaactgcgaccaactggattgccaacatgattgtcggtgcaaccttcctgaccatgcttgatagcctgggcaatgccaacaccttctgggtgtacggcggtctgaacctggtgtttatcttcatcaccctggcgttgattccggaaactaaaaacgtttctctggaacacatcgagcgcaacctgatgagcggtaaaccgctgaaaaacattggcgactagtcttcccgctgattaatctgcaaaggcgctcattgagcgcctttgctatttacggcccaatccgcttgcacaaacctcggcgtcagatttatgctttaatgatgaaaagcaccagaatcccgattgccctgcaacaagccgtaatgcgctgcctgcgtgagaaattacagcttgccaaccagaaactcaaaaccgcgtatcctgaacctgaactcaactatcagcaacgaggtaccagcgcgggtaccgcgtacctgcaatactggcaaattcgcctcaatcccgtcttgttgctcgaaaaccaacaggcgttcgtagacgaagttgtgccgcacgagctcgcgcacctgctggtctataaacattttggccgcgcggcggccccgcacggtaaggagtggcgctggatgatggaatccgtgcttgaggtctcagccagccgcacgcaccaattcaccgtgacctcggtacagagcaaaacctatccctatgtctgccagtgccgtgaccatcaactcaccgtgcgtcgccacaataaagtcctgcgtcaagaggctgaatatcgctgtagccactgtggaacattactgcgcttcaaggccgcccaccctcattaaagacgcgactaagccaatcgtttaactcattaaaatatatcagttatctcattgatagcctgtttgacatccgctaccctgcccgctttgaatatcaggctgctctggaatatgtctcgtaaaattttgctgttgttgcccctctttgcactctcgtcttttaacgcatttagccgctccaccgagggcgtcactattaataacttcagccaggcgaaggctgcagcggttaaagttaatcacgatgcaccgaccttttactgcggctgtagggtgagctggagcggcaaaaaagggacgcctgacctccagtcgtgcggctacagtgtgcgtaaaaatgcccagcgcgccgacaggatcgagtgggagcacgtggtcccggcatgggaatttggacaccagcgccagtgctggcagaacggcgggcgtaaggactgcgccaaagacgcgggctatcgccagattgaaaccgacctgcataatttgcaacccgcgataggtgaggttaacggcgaccgcaataacttccagtacggccaatggaatggaactgcgacccaatacggacgctgtgagatgaagatcgattttaaaaacaaggttgcagaaccccctgctcgcgcccgtggtgctattgcacgcacctatttctacatgcgtgaccgttaccatctgaacctgtcgcgtcaacaaacgcagctgtttaccgcctgggataagctgtatcccgtgacgccatgggagtgtgagcgcgataatcgcatcgccgcgattcaggggaatcacaacaactatgttcagcaggcttgccagcggggaaacagctaacctactatatctccctataatgcctgtcatgcacgttccgccccgcactctggtcgaacgtgctgcctaatagcgcctcggcgctgtttttttatcaaaggatcacagcctcacatgcgaataccccgcatttttcatcctgagcttctgagcgcgcatagcgaagttgtcctcagcgaagacgccgcaaatcacgtcggccgtgtactgcgcatgcaaccggggcagcttatccagctgttcgacggatccaatcaggtctttgaagccagcctgactcaggtcgacaaaaagagcgtgcgtgtgcagctcggtgacgctgagtgggttaataacgaatcgccgcttaatctgcatctgggccaggttatttcgcgcggcgagaagatggaatttaccattcagaaatccatcgaactgggcgttaataccattacgcctctgttttcggagcgctgcggggtgaagcttgacggtgaacgtctggcgaaaaagctgcaacagtggcaaaaaatcgcgattgccgcctgtgaacagtgtggacgcaaccgcgtgccagagatacgtgaagcgatgcctctggagcaatggtgcgccgagcaggacaacagtctgaagcttaatttgcatcctcgtgccagccacagcatcaatacgctgccgctaccggtagaacatgtgcgattattgattggtcctgaaggcggactgaccgccgatgagattgcgatgaccacgggctacggatttactgatatcctgttaggaccgcgcgttttacgcacagaaacaacagcgctcaccgccatcaccgccctgcaggtgcgttttggcgacctgggctagaagcaggctctaaaggagagatgatgattaagcttggcatcgtgatggacccgatttcgtccatcaacatcaagaaagacaccagcttcgccatgttgctggaagcccagcgtcgcggctatgaactgcactacatggagatgaactcgctttatcttcgcggcggcgaaggccgtgcgcagacccgtaagctgctggtcaaacaagattacgaaagctggtatcagtttggcgacgagcaggacatcgccctgcaagacctcgacgttgtgctgatgcgtaaagatcccccgttcgataccgagttcatctacgcaacctacattcttgagcgcgcagaagaaaaaggcacgcttatcgtcaacaagccgcagagcctgcgcgactgtaatgagaagctgttcaccgcctggttccctgaactgacgccggacacgctggttacccgcaacgcctcgcagctgaagacattctataaagaacatagcgacgtcatccttaagccgctcgacggcatgggcggcgcgtctattttccgcctgaagcctgaagatgccaacgtctcggtcattatcgagaccctgaccgaacacggcagccgctactgcatggcgcaaaactatctgccagccattaaagacggcgacaaacgtgtactggtggtcgacggcgaaccggtgccttattgcctggctcgtatcccgtcccagggcgaaacccgtggcaatctggccgccggtggacgtggtgaagcgcgccctctgagcgaaagcgattgggcgattgcacgcaccgtggcacctacgctgaagaaaaaaggcctgatctttgtcggtctcgatatcatcggcgatcgtctgaccgagattaacgtcaccagcccaacctgcgttcgtgaaatcgaagctgcgttcccggatatctctatcaccggaatgttgatggacgctatcgaagcccgcctcgccgctcgttaatttgccatctgtggcggcaagacgctttgccgcctgctattatttttatagcctaccgaaaaagcatataaaatttatgaacctacagcatcactttcttattgccatgcccggactggatgaacccctgttcaaacgttcggttatctacgtgtgcgagcacaatgaagacggcgcaatgggtctggtgatcaataaactggtcgaggacttcacggttaaaaacgtgctcgacaagttagacatcgacccgacgccgcgcgatccttctattaatctcgacaggccggtgttctctggcggcccgctggcggacgatcgtggattcattctccacacgccgtgcaacaattttggctccagcattcagatttccgatcaaacaatgattaccacgtcaaaagacgtgctcgaaacgctgggtacgccagatcaacctaaagacgtgttggttgctctgggctacgctgcctgggagcagggccagctcgaacaagaactgctgaacaacagctggctgaccatagaagccaacagcgacatcattttcagaacgcctatcgctgaacgctggcgtgaagcggccaaaatgatcggcatcgaagtcagccaactcgcgacccacgcaggccacgcataatgggcaatcgcacgctgtttgccttcgacttcggcaccaaaagcatcggtctggctatcggccaggaggtcaccggtaccgcgcgtccgttaacctctttcaaagctcaggacggcacacccgactggcagaaaatcgagaagctgctcaaggagtggcaacccgatctggttatcgtcggacttcctctcaatatggacggcaccgaacaacctttaaccgccagagcccgcaagtttgccaaccgcctgcacggccgctttggcgtgcaggtggagctgcacgatgagcgtctaagtaccgtagaggcgcgtgccgacctgtttgagcgaggcggtttccgcgccctggataaaggcagcgttgacgcggcgtctgcggttatcatcctcgaaagctggttcgagaatcagtggaacaaaccctgaggccgttaatgccccattagtctgcaagcaaccccgcgctcacgcgctgctgcctgcactgctcaaaggtctgcatgccggcttcaccgccggtttgcaggctgtcctgcaactgatgcgtctttccctcacgaatcaaattacggaccgccggtgtcgaggtcagcatctcatataacgcaaccctgccgccctgcttagcggtcagcagtttttgcgccaatatgccacgcaggcttccggcaagctgtgcgcggacgaaggccttttcgtcggcgggaaagacgtcaattagccggtcaacggcctgtgcggcatggcgagcatgaagcgtggccagcaccagatgccccgtttcggcggcggttaacgccagtcgaatactgtcactgtcgcgaagttcgccgagcagcagtacgtcaggatcctctcgcagcgcagcgcgtatggcctgtacaaatgaaggcgtatgagtgcccagctcacgctgttgaattaaacaacggtcgctggtgtgcaagaattcaatcgggtcttccaaggtgataatgtgccgtgtgcgggtctgattgaggtggccaatcatcgccgccagcgtggtcgatttaccgctgccggtggcaccggtaatcagaatcaggccatcttcgtgttcactgagccggcgcagaatatcggggcattcaagtctgcaagactcgggcaacgctgcggcagcggtcgcagcgccgccgagagcccggagaattggcgaaagaagttaaccctgatacgcctgccgcttgccagcgtaaccgccgcgtcggcctgcccaagctgttttaactcaatttgctgggcgtcgccgagccactcctcactgagcgccaccatctgcgcaggggtgagacgttcggaatattggccgccgatcagttctccgtcaatgcgtaacataggcaactgaccggtacaaaggtgcagatccgaggcgttttgctttacactaagctccacaaaattactgatatccatttgaaacactcctgagccaatatgaatcaacgtcagcattcagctattgcggaaaatctacagcaagtcagagagcgtatcgcctcttctgccgccctttgcgagcggtctccagaagaaattacgctgcttgcagtcagtaaaaccaaacctgcgagcgctatcgaagaagcaatcgccgccgggcaactggcctttggtgaaaactatgttcaggaaggggtagagaaagtcgccgccttcagcaaccaccagcccccgctggtctggcactttattggcccactacagtctaataaaagccgtctggtcgccgagaatttcgactggtgccacaccctcgatcgcctgaaaatcgcgcagcgcctcaacgaacagcgtcccaaagacaaagcgcctttgcaggtgctgattcaggtcaacatcagcgatgagcagagcaaatcagggatttctcttgcagaagtgccgcagctggccgccgatatcgcagcgatgcctcatctcatgctgcgcggcctgatggctattcccgcggcagaaaccgattacgacagccaactggccgttttccgccagatgaccgaagcttttaacagcctcaaactcagttatcctcagattgatacgctgtcgatgggaatgaccgacgacatgcccgccgccatcgccgcaggcagcacgatggttcgcatcggtacggcaattttcggcgcacgcgattattccgcgtaagcctgaaatctgcatcaggcaaaaacgagcgcagtgcactccgctgcgaccagatacgacgtgtagttagggagagttatgcaacatcgtaaactatgtttcatcggcgccggtaacatggctggagccatcatcgcaggtctggttaccagcggttatccagccagtctgatcagcgtctgcgcgccttcaaacaaaaaccgtgatgcgttggccgagaaatatggcatccacagcagcagcgataatatcgcctgcgcaggcgatgccgaggtggtggtgctggcggtaaaaccgcagctcatggccgacgtctgcaaggatttgcatcagcacatcgacttcagcaacaagctggttctgtcgattgccgccggtgtcagcgttgagcgcttctatgcactgctgggcaaagatctgaatatcgtacgcattatgccaaataccccgtctctggtcggcaaaggcatgagcgggctttatgccccgtcgcaggtgagcgaacaagaccgcgaatacagcagcgagctgatgaccgccgtcggcaaaatctgttgggttgatagcgaagaaggcatcaatcaagtgatcgccgccgcaggcagcgcaccggcctatttcttcctgtttatggaagcgatgcagcaagaggcccagcgtcagggtctgagtgccaacagtgcgcgcctgctggttcagcaggccgcaagcggtgccgcggcgctggttgaagccaacccggagacgccgctgtctacgcttcgggagaatgtgacttccaaaggtggcacaaccttcgaagcactaaaagtatttaatgagcgtgaactgaccgctatcgtagcagaggcgatgcaggcggcagttcaccgcgctcaggaaatggaaaaacttttctagttttcaggccgtacgcttcagatatggcctgctgcggcaggccgatatcctctagggacaaaatccaattaattcaaagcatcactttgaattgttcatcacaagaataaggttatttatgctcacgctgacttttctggtcaaaacactgattgacctctatgtcatggttttacttttacgcatctggatgcagtgggcgagaaccgatttttataatcccttctcgcaatttgttgttaaaataacccaaccgattattgggccgctgcgccgaatcattccccactgggtcccatcgacagcgcatcgttgctactggctttcctgctgatgacgattaagtatcctctgctgctgttgattcagggcggtggcatctcactcagcccgtataacctgctgtttgggctaatagcgctggtcaagtccgccggctatctggtgttctggcttatcattattcgttctctgatgagctgggtgagtcagggccgtggcgcgatggattacgtactgatgcagctgaccgaacccctgatggcgccaatccgtcgtattattccggcgatgggcggcatcgatttctcggcgatggtggttatccttattctgtatatgctgaactacctcggcatggatctgttgggcgagctctggttcctgctttaatccagggtcgctaaaacgcggcggccagagacgctctgctcgccgcgtaaaattttttaattcaggaagtagaaatgcaaaaagtagtgctggccaccggtaatcccggaaaagttcgcgaactcgcgcacctcctcgccaacttcggtctcgaagtcgtggcgcaaaccgagctgggcgttgatgacgcagatgaaaccggcctgacctttattgaaaacgccatcatcaaggcgcgtcatgcggcacaaatcactggcctgccggcagtcgccgacgactcaggtctggcggtcgattttctcggcggtgcgccggggatttactccgcgcgctattctggtgaaggtgccaccgatcgtaagaaccttgaaaagctgctcgacgcgctgaaagacgtgccggaaggccagcgtcaggcgcagttccactgcgtgctggtctatatgcgccacgcagaagatccaacgccgctggtatgtcacggcagctgggccggtgaaatcattcacgcaccggccggtgaaggcggttttggttacgaccctattttctatattccggcgctgggcaagaccgccgcagagctgacccgcgaagaaaaaagcgcggtttctcatcgtggtctggcgttggctcagttactgcaagccatgtccggggctgccgaaaagaatgcgtaagctgccccctttaagtctgtatctgcatattccctggtgtgttcaaaaatgcccttactgcgatttcaactcgcatgccttgaagggcgaggtgccgcatgatgattatgtggcgcacctgctggcggatttggatgccgatctgcctctgaccgcaggccgaactgtagaaaccatttttatcggcggtggcacgccgagcctgctcagcagcgaagcaatgcaaaatctgctcgacggcgttcgcgcgcgcctgccgctctcagcagatgccgagataacgatggaagcgaacccaggcaccgttgaggcagaccgtttcagcggctatcaacgggcgggcgtcaaccgtatctctatcggcgtacaaagttttagcgcagagaaactggaacgcttaggccggatccacggcccggacgaagccaagcgggcggcccatctcgccaccggactcggtctgcgtagctttaacctcgacctgatgcacggcctgccgaatcagacgctggaacaggcgctggacgacctgcgtcaggcaatcgccctcaatcctccgcacctgtcgtggtatcagctcaccatcgagcctaacacgctgtttgcctcacgcacgcccgtgctgcctgacgacgatgcgctgtgggacatcttcgagcagggcgacaaattgctcaccgccgccggttatcagcagtacgaaacctcggcctatgccaagccgggataccagtgtcagcacaacctgaactactggcgcttcggggactacctgggcgtaggctgtggcgcccacggcaagctcactcagccagacggcactattttgcgtacggtcaaaaccaagcatcctcgcggctatatgcagggtcgctacatggacaaacagcacgaggtcgacggcaaagagctgccgttcgagttctttatgaatcgattccgactgctggaggccgcaccgcgcgaagagtttggaatttacaccgggctggaagagtcgagcattcgtgcgcagcttgatgaagccatcgccagcgaatatctggtcgagacggcgacgcactggcagataaccgagaaaggcaaactgttcctgaactcactgctggaactgtttttagccgattaagcggtggctcccccaccaggcgatggggagccatttatgactacggcttgatgtccgccaacagctcacgacgctgctgctcgagagaggtcacgcgattacatacgctgtgcccgaagccctcaaactcgccctgctgtttcttccattcagcctgcaccgcttgctgtagcccgccgaggttgctcatcatggcctgcaacggattgccaccgctcgccatctgacgcgtccccatttcattcatgctgtcctgcatcacgccgcccatggtttgttcaaccagatgctggccgtcctgctgcactttatcaatcgcctgatgatggaaggtcaggccgtcagggcgatgctcaatgacgcgattcatctgcgctttcagctggccgtcaagtttggtcaggcgattacgcacattgctgtctggacccagttgctgaacgatgatgccgtccatcgctacgcgggctttctcaagatgcgctcgagccccctggtcaatccacggcaggtctcgacgcaaggccgcctggtagtccacggcttcctggcgctgcctggcggtcagagaaatatctttgccattgtcactcaacgaaccgttctgggtaatcagcagattgccgctggcacctaccacctgcacggtatctggcttgatgacaatgtcgtctttcggtttagcgctgcactgaaactcggcgtgagcctgcaacgcagtcaaggcgagaagaccgatcaggccgtgtttcaatcctgtttttgctaacatttttactcccttgggctcgcaagccggcaggctatgcctttcgtctgcgaacgcgcgattaaaatattgaacggccaattctttgcgccagtaactctaaggcagcggttccggctaaagagttcccggcggcatccagctccggtgaccacacggcgatacacatctcttcaggcaccaccgcgataatcccgccgccaacgcctgatttaccgggcatgccgacgcgataggcaaactcacccgcgccgtcatacatgccgctggtcaccatgagggcgttgatatgtcgtgcctgactcggctcgataatcggctcttctgcgcccggcatcagccctttgttcaccagatacaggaaggtccgcgccagctcgcaacagctcatcttcagcgagcagtagttgaaataggtttgcagcactgtgataacgtcattttcaaaattaccaaatgacttcatcaggtaggctatcgcagcattgcgatcggagtgttcgaattcggaacgagccaccagtgtgtcgtagtgaatatcctgctcgccagaaagctggcgcacgacctcaagcatacgctgcttcggcgctgcgagacgactttgcagcatgtcacagataaccagcgcacccgggttgataaacgggttgcgcggcttgcccttctccagctcgagctggaccagcgagttaaacggctgacccgaaggctctttgccgacgcgctgccagatttcatgctcttcgtaacggctcagggcaagcgtcaggcttaatactttggaaatagactggatagaaaaacgcgtgtttgcatcaccggcataaaactgctggccgtccacggtacacaccgcgatcccgagattattaggatcgacggtcgccagcgccggaatatagtccgccacttttccctgaccaatcaaaggccgaacctgagcgaggatctcttccagcaggccgttatctaattcagtcgacaaggtatttccctttaaaaataattaaagcgccatgaaggcgctttagataactgattcaggggaggtaaatcaatcccaccagatatcgaacagttcgctaacttcaacgtcctgcattttatggtcttccaaccattttttcactagttggcgatgctcatcggtgcaacgaccgatttcctgtaggcaaaccaggccttcccaaacaagatagccgctgccgtcaaaggccagcttattaggttcaatcacgccgtcaatgaaagcgtccaggaattcgtcgatcgtctcgacgctcgttccttcagcgaagtgccattttacggagaaacccagctcttgaaactcttcaatgtgtaacttcttacgtaaacgacgactgcgattcttggccattattgcttcctctcaaacatcagatcccatacgccgtggcctaaacgctgaccacgcatttcgaacttggttaccgggcgcgattctggacgaggaacatagttgccctcggccgacagattgccataagcctccacgccgctcatcacttcgagcatgtgttctgcataaggttcccaatctgttgccatgtggaacacaccacccagcttcaatttacggcgcaccagctcaacgaacggagtttgcacgatgcgacgtttgttgtgacgggccttatgccacgggtctggaaagaatagctgcaccatatcaagtgagccatctggaatcatggtttccagtacttcaacggcatcgtggcacatcacgcgaaggttgctgacgccttcttcttgcgccgtcgcgaggcacgcacccacgcccggtgagtgcacttcaatgccgataaagttttgttccgggtgctgctgggccatcgtcaccagcgaggttcccatcccgaaaccgatttcgagaacggtgtgcgcttcgcgaccaaacagcgaggcaatctcgacacgctgcgactgatattcaacgcccatcaccgaccagtaattgtccagcgcatactgctgacccttggtcagacggccctgacggcgcacaaaactgcggatacggcgcatagcgcgaccgttttcatcaaactccggtgaaatgacgtcatttttcatagtgctttctatctgtctggcgataattttagggaatggcgcattatccaaagatacccgcctttagcaagctctcgtttaaaatcggacactttagccggtacatttttcaccctctcaatatttcgccaggctggcaggcggcaactgcgcaaatcccccatcgctgacttaatttagagactggggtgagtaaaggcagccaacccccagcattgcgaagaatgaaggggataagagaaagttccggtttacagctcaaagactctatgctgcaatccttagctgaattttaaccctcgacgggatttgtaatacgcctatgatggaagcgcatcgcttcgcgcctgcggtactcgattggtatcaacgctatggtcgcaagaccctaccgtggcagctcgaaaaaactccctataaagtctggctctccgaggtgatgctacagcaaactcaagttgcgacagttatcccctacttccagcgctttatggaaaacttcccaaccgtcaccgcgttagcggccgctccgcttgacgaggttctgcacctttggaccggactcggttactacgcccgtgcccgcaatctgcacaaagccgcgcagactattgtggcacaacataacggcgaattcccaaccaccttcgaagaagttaatgcgctatccggcgtagggcgctcgaccgcaggtgccatcctgtcgctctccctggggcagcattaccctattctcgacggcaacgtaaaacgcgtgcttgcacgttgctatgccgtcgacggctggccgggtgagaaaaaggtcgaaaaccggctgtggcagataaccgaagaggtgacgccggccaagggcgtggaacagtttaatcaggcaatgatggaccttggtgcgatggtctgcacccgctcgcgtccaaagtgcgagctttgcccgctgagcttcggctgcgttgcttacgccaaccatagctggcagaactatccgggcaaaaaacctaaaaaaacgttgccggagaaaaccgcctacatgctgatgattcagcggggtgacaaggtttggctagaacagcgtccgcctgtcggtctgtggggagggctgttctgcttcccgcagtttgccagcgaagacgagctaataaccggcggcaaaaaatatgcgatagcgcgtagcgcaatgcagcaaatggtctctttccgccatactttcagccattttcatctcgatatcgtgccgatgttgataaatatcgactcggtagcgggttgcatggatgaaggctcaggtctctggtataacttagcgcagccgcagtctgtcgggctggcagccccggttgaacgtctgttgggtcaactggcaaaagcgctgccacgatagcaatattaataacctaactcgttgattttaagccattaaaatggaacccccagcgcgagttgtggtcaccgggccatagatgaggaattaagtatgagcaggacaattttttgtacgttcttgaataaagaagccgaaggccaggattttcagctatatccgggcgaagtgggtaaacgtatctacaacgaaatctctaaagaagcttgggcgcagtggctgaagaaacaaaccatgctcatcaacgaaaaaaaattaagcatgatgaatctcgatgaccgcaaactgctggaacaagagatgatcaatttcctgttcgaaggccatgatgtgcatatcgaaggctacacaccgccttccgagtaacacccatacccatttggggccaatgtccgcaaggataatggccctatttttcatcacgatacggctattaagatgaagaaaattttagcgttactggttatcgcgcctttgttgatttcctgttcgagcaataaaaacaatcaattcaacgaagcttacatcaaagataccaatggctttgacattttgatgggccaatttgcccacaacatcgagaacatctggggcattaatgaagtcctgatcgccggaccaaaagactacgtaaaatatagcgatcagtatgagacccgcagccacatcaactttgaagcgggtaccattaccatcgaaaccatctcggggatcgatcctaccgataagctgcgtcaggccatcgtgaaaaccctgttggtcggcgaagatgctaccggcgttgacctctattccgacgccaatgacatccagatcagtaaagagcccatgctttatggtcaggtgctagacaataccgggcagcctatccgctggcagggtcgtgcgaccaactttgccaactatttgctgcaatacaagctgcaagaacgtcagtccggcctgcatatcatctattccgtgacgattcagatggtgccgaaccacctggacaaacgggcgcataaatatctgccgttggtgcgcgaagccgccgcaagatacggcgtcgatcagtcactgatcctggctatcatgcagaccgagtccgcctttaacccgtatgcggtgagtaacgccgacgcgctgggtctgatgcaggttgtgcagcacaccgccggtgccgacgtatttaaagcggaaggacgctggggcacgccgagccgtagttatctgtttgatccagcgaacaatatcaacaccggcacggcctatctggcaatgctacaaaacgtctatctggcagggataaccaacccgacctcgagacgctatgctgtgattacggcttataacggcggtgcgggcagcgtgctgagggtcttctcgagcgataagactacggcgtttaatatgataaacgatatggcgccgggagacgtttacgatacgctgataagccgacatccttcgggtgagtcccgccgttacctgtataaagtgaacaatacgcagagaagctaccgccgtaccgactagtcgagacggaggcagtgcaagcaaaacggagacccaaaaggtctccgtttttttgttttgagcgaaatataaaaatacggattaaaaagtcgtcttatagtttatcactgcatcatccactaactcattcacgttattcgtcttccttctcgccaatcgattaaatcacagtcttaacggtagacatatagagatatatcatgcgcataatttcagattcgacgctggctcttcagcgctgtttttcagctcagaatattacccggcttccagcgaataatagcgccatcagtcggctgaattacctcgacttagcggtggattgcactccgttaacagataaacttattgcggcgatgcacgtaccgtctgatagagagattgcgaatacgctacgtgcgctggacgatatattgctaactgcggagcaggccgctgctgaatcagcaactgaaatcagtgtcgatgaccttcagttgcaaacatcgctttctgattatatttttgaaaatgctgtcccaatcgattatgaattatgtcgttctctgagcatcatcagcgaaagcagctcatcctgctcctcgctaaccagccaatccatgcagaacggcggctggagccgacttagaaatatattaagccttgcgcaggacgacaatctttgccgttatttccagaacactaaaaatatcgtattacgcagtgctatctgtgtcgcgctaccgactttcctgcgtcagctaattgcctattataccgaggcaagccttgagagctattctgccagcaaagccacacgcctgtcgttggcattattttccagcaccgtgccactgctgctaaattttatcggcggcttacgcgattattttcacggcacggccaacgttgtgactcagagttctcgcgcatttaatatgttggtgtgcagcggcgcactcattgccgctgcgaccaccgacgtattacccggtattgcttcaacgctggtttcttttctcttttatagcttacttcgagaaggcacacagactcttgttcgtctaagtagcgaggcgaaaataggcgtcacacaaactttactcgccgcagggttgtatattcccaatcaggtggcagtctctttcaccatgtcacaaacagcttcaccgtctggcgctgcgtcggccgcgcagcactgcatctatggcgatacagtggtcaacgatctactgcgggcgggaattaacacggcgggagaactggcagacagcctggtgtttcgcgggctaaacgccctgcatagcgagattccgctcaggaatcggctggagataagctggcccgagagtgaactgcctggagatgtcatgtttaactcaatcgcggctagaacagcgctaatgaccactccgctgatggcgtccgccgctttacaaactgccctcgcgcagtactttgatgaacaaaccctggaacagattgacgatgcctttaatgcggtcttactgggaatgatctatccgagttttgtggcggctatcaccgggtatcctgcaccttccatgacagattccaagtgctgaccatcagaatgaaaaaacggagccattgctccgttttttaaggtcttttaaggcattcttagagaaaaatcagattactcggcgatgacataacccatcacgcgcttccaaccgaccgttttctcaacgtacacaccctgcaattccggtgagaagcccggcagaatatttatgccctcttccagcgccatgaaataacgctgaactgcgccccccacagttcgcccggcaccacacagagcacgcccggaggataaggcagtgcgccttccgccgcgatgcgcccttcggcctggctaatgggcaccagctcgacgttgtcgcgaatgaattcactgtgcgcgtcctgcgggttcatcaccacctgcgggaagcctttctcgcggaacatctctttttgcagctcttttacgtcgaagctgacgtaaaggttatgcatctcctgacaaagctgacgaatggtgtagtcgcggtagcgctcttcattcttgcgatacacggtcggcagtacttcgctcagcagcgcatcttctgcgatatagcgttcaaaacgggcgatctcttgcaccaggtgctgcatcttggccggtgtttcagccggagtcagcaggaacaggatcgagttcaggtcgcacttctctggcacgatgccgttctcacgcaggtagttagcgagaatggtggccgggatcccgaactcggtgtatttcccgctgcttgcatcgatgcccggcgtggtcagcaacagtttgcaagggtcgacaaagtactgcttctcggcatagcccgcgaaggcgtgccagcgctcgcccggcacgaagtcgaagaagcgcacgtcgctcgccatctgttcggtgtcgtgatcctgccacggcttaccgtcaatcagcggcggcacgaacggctggatcatcgagcactgatttagcagcatcttgcgagtgtcaatgccaagcttcacgcactccatccacatatgcttgccgctgccgcccgcatgcatacgcgcgttgacgtccagcgcggcaaacagcgggtaaaacggactggtcgaggcgtgcatcataaaggcgttattgagctttttatggctgcaatggcgtttctggcctttgatatgattatcttttttatgaatttgcgaagtttgggagaaaccggcctgctgtttgtgcaccgactgagtgacgataattcccgggtcgttttcgttcagctcaagcagcagcggcgaacactctttcatcatcgggatgaactgctcatagccgacccacgccgagtcaaacaggatgtagtcacacagatgaccaatcttctccaccacctgacgggcgttgtaaacagtgccgtcgtaagtgcctagctggataatcgccagacggaacgggcgtttttcattggcgcgctcaggcgcaacctcttgaatttgcttacgcagatagcgctcgtcgaagcaggccgcgtcgataccgccgatgaagccaaacgggttacgcgccgtttcgagatacaccggcgtagcgcccgcctgcagcagcgcgccatggtggttcgacttgtggttattgcggtcgaacagcaccagatcgccacgggtcagcaacgcgttggtcaccaccttgttggccgccgaggtgccgttaagcacaaaataggtcttgtctgcgctgaagactttcgccgcgtgtttctgcgcgtctttggccgatccttcgtggataagcagatcgcccagcttcacgtccgcgttgcacatgtccgaacggaagatgttttcgccgaaaaactcgaagaactgacgtccggccggatgacgacggaaaaattccccgccctgatgtcccggacaggcaaaagtggaattttccatctcgacgtatttcttcagcgtgtcgaagaacggcggaaatagcccctgctcgtactcgtcggcagcagcttcaagctgagcggcatagaacgcctgattggcatcggccagggcaaaaacgcccttgagcgcagacaaataatttggagaaacctgctccgctccctgtactgcaacaaacgcagggatactgaatcccagggcttcaactgccgccagcctgccgttattaaggtcatccacggaaattactatcgccgcaacgtcggtgtagtccgcactttcaaggcttactacgccacgcggtgtatcaagatgggatgccacggaggcgcttgctgctatttttaactgtttcatattacagggctctcaaacggttaagtaagagggtgtgccagagtggcacggcaatgagcaggtttgttcaacgcaggggacgctttttacgtggtccatacgtggagaccggcccgacaaagtgacgttagctaaggggtgatgtcgagattaggtaagacgttgctctatttttaagcatagtcgttacgatacgattaaccggtctcagccacgtctgatagacatcagtaaaatcagagaacggctctgtttttaataatgcctaaccgcgagcaaaggctagccttaccgcatgaaaggatttacaacgggagaaaaacaggaaatgtcgaggtcgctgcaccctggcgtcatcatcaatgttctttggcactggcgtgcagtgcagtctgataaaccggtcatgagccgcaaccctcttgagctgtcgcgtagaaaagaaagtgtattttcttgcctaagaaaacggcgcaataatcgcaccttttaccctcaggttcaagcctgaaacattgtcaaaaaatgaaagagtttatgatacaaacggcgatgtttttttcaggtctcgcgaagcgttttcgcacgccagaaacctcggctctctggggggaaaagggcgaaggaccgcatagattgctcctttgtcgtgacgccatcatctacgcttaagtaaacctcaaccaacctcaggcaggctgcgcgagtctctgtcctgagatgcggagatgaaaagatgaagattggaataataggtgcaggaatggtgggcagagcctttgcggcggcggctatcaaacagggccacgaggtcatgattgccaactcgcgccaaccggataccctttactcgctaacaaaatcgctcggcgccaaggccggactggcaaaagaggcggccgaatttgccgacgtggtattgctcgccatcccgtttaaatattacgagcagatcccggcagaatggttagtgggcaaggttctcatcgacgccaataactattaccccgaacgcgatgggcaaatcgccctgctcgataacaaagaatcgaccaccagcgaaatgatcgccagccacttttcgggggccagagtggtcaaagccttcaacgcgattttagccgaggagatcctcggaggcggtaagcttgcggggtcggaaaagcaccgtgcgcaccctatcgccggtgatgatcagcaggcaaaaaaaatcgttgagcatctgctggagcagtttggttttgaggtcatagatgtgggtaatttgagcgagggataccgctttgaacgtggatcacccgcttattgcattccgatggacggggcaatgctgcgacaaacgctggaagaggtacagagcaataattaaggctgcgctcggggcttttgtccccggcgcatggcctattacagctcttgtcgagtggggcggaaaagaatttcgttaatatcgacgtcttccggctgactgatggcaaaggctactacgctggcgaatgactcggccgaaatcgccgtatcctcatagaattgtttgatatttttcgccacgtccggctcggtgatgctgtcagccagctcgctggtcacggcccctggagagataatcgtcgtgcgaatattgtagggcttcacttcctggcgcagcccctcagagatgacgcgaacggcagttttcgttgccgcatagaccgcgctacccgggcgaaccttgtgaccggcaaccgatgaggtattgataatatgcccgcttttctgctctttcatgtacggcaatgccgccgcaatgccgtacagcacgcctttgaggttaacgtcaatcattgcgttccagtcgtcgaacttacggcgttcgagcagtgaatgcggcatcaaaccggcgttgttaacaatcacgtcaatgcgtccatagtggcttactgctcggtccaccagcgcctgaacctgctgcgggtcggtcacgtcggttttcagaatagcgtctttactcagcgaaagttcttcggcaattttgaccagcctgtcgaggcggcgtgcacccagcaccagttttgctccgtccttgtgcaaacgacgcgccagtgcttcgcccaaaccgctgctggcgcccacgataactaccactttattttcgataccttgcgacatagtgcctccgcattttttcaaaatagctctgataagacgctgatatttgtctgataacggcttaaagggtgcgactacttctgatattgctcgtcagtaaccttttccagccattcgattgagctgccgttcagtgattcggcgatagcgatatgggtcatggcattctctggcgtggcgccatgccaatgctttatgccttccgggatccagacgatatcaccttgatgaatatcctgaatttcagccccccactcctgtaaccatccacgcccttgcgtcacaatcagcgtctgaccaagaggatgagtatgccaggcgttgcgggctcccggctcaaaagtgacaatcgcgccactgatgttcgcagattccgtccctttaaacggcgagtcgattcgcaccttgccggtaaaataggcttcgggagcggcctgacttggctgagaacctgcgcgggtaatttttatgctcattgtttctccgtgtcggcagaactgccgtcattattttagtgtttataaaatagggctgttttagaaagtaacaaataggcagagccaagagtagatagaataatgcgctagaacatatgagctaaactcataaatggaagggcctgtctgtgttacaaagagccaagcgtcttaaagattagcccaaaaagtgatgctcaggcgagaaattgcagactgagtcacgttattaccgacaaggtatttacatgctaaaagaaaacttcaatgacttaatgtcatttctggtggtggcaagagagcgcagttttacccgcgccgcggccaaactgggcgtatcccagtcggcgttaagccacgcaatacgcgggctggaagagcgtcttgaggtgcgtcttctgacccgtaccacgcgcagcgttgcccccaccgaagccggtgaaaacctggtcagtagtataggtccgcactttgaagaaattgaaaatcacctcgatgcgctgagcgaaattcgcgacaggccgagcggtaatattcgcctgaccgcaggtgaacatgcgctcgattcggcgctgtggccggtaatgaaaaattttctggcggattatcctgatattaacgttgaggttatcgtcgataacgcactgatggatatcgtcagcgacagattcgatgccggcatccgcctgggtgaacaagtagcgaaagacatggttgccgtcagaatcgggcctgaaatgcgcatggcggtcgtcggcaccccgacatacttcgaaaaatatggcacgccctctacccctcaagatctgcaaaatcatcgttgtatcaatatgcgcttaccgacactcggcgggatctatgcctgggagttcgaaaaagagggcaaagagctaaaaataagggtcgatggacagctgaccttcaacagcctgcgtcaacggctagaggcggcccacctgggtttcggtctagtctatttacctgaagacgtggtgaaggacgacctcacacagggccgattaatacgcgtactcgaagattggtgtgcaccattccccggctattatctctattatcccagccgcaaacagcacaccaaagccttctccctattggttgaggcgctgcgctatcaacggtaacccttcatatttcgcaggcctcgattatcaggaaaacggcgtaagaggttcaatcttggcgagtatttcataggtcaaccgcaccgattggcaatcaatttccgctttccatcagcatgattgcggcattcctcaactcatttcgagatctgatatgtccggattattctctccgtttatccttaaagacgtcacgctgcgtaaccgcatcgccatccccctatgtgccaatacagcgcggtcgatggcctgacaaacgactggcatcgcgtgcattacgcaagcctcgcgcgcggtggagcgggtctggttattgtcgaggcgaccgccgtgtctcccgaaggtcgtatcacccccggatgcctgggtttatggaacgatgtgcaggcagaaagactggcgcagatagccaaagagattaaagctgccggtgccgtgccggggattcagattggtcacgcaggccgtaaagccagcgccaacctgccgtgggaaggtgatgatcatatcgcggcgggcgacagtcgtggctgggagacaatctctccctccgccgtggcgtttggtcaccacctgccaaaagtacctcacgaaatgacgctggccgatatcgctcgcgttaaagccgattttgttgccgcgactcgccgcgcgcgtgatgcaggtttcgaatggattgagctgcacttcgctcacggctacctggcacagagcttcttctccgtgcacgctaatcagcgtcaggacgcctacggcggtaatgtcgaagggcgcagccgtttcctgctcgagacactggaagccgtgcgcagtgaatggcctgaaaacctgccgttgactgcacgtttcggcgtgattgagtatgacggacgcgatgaagaaacgctggaagaggctatcggcctcaccaaaaaattccgtgcgggcgggctggacctgctgagcgtcagcatcggtttctcaaccgccgactccaacattccctggggtgccggattcctggcacctgtcgccgagcgcgtgcgtaatgaagcggggatcccggtagcttctgcatggggtatcgactcaccggttatcgccagtcagaccatcgagcagaatcagctggatctggtgatggtaggccgtgcgcacctcgctaaccctaactggccttatcaggcggccaaggcactgagtaaagaagagccgtcatgggtgctgccagcgccttatgcacactggcttgaacgctattcaacggctgaataacgcactttgatactgacgtttcccgcctgataacgggcgggaaatatttaaaataagctgcaaattttactttttattgagttcgctaaacggcacgccaccgcgagacttgttaacagccttggtctcaacaatcgataccacaacacgttcggcatccacctctaaagactccaccacggcttcggtaatcttcttcattagcttggttttttgctcaaccgagcgcccttctaccgcgtaaaccacgatctctggcatgttctcttccctcgtctaacgctatttgtgtaggaaaaataatacactagcatttaacaactatattaattttagtaacaataattgaacactttaacccaaggttatgaagggatattatgagcgtactagagaatgattgcgcaaacattccccctttccaacgtaagttggcgtgagttaaccagtggaaaatgcattgaataacgaaaaaactgctaacaaaaatcaatcccgatcccccacgttagaggacgtcgccagagccgccgggttgtcaccgatgacggtcagccgggctctgaataacccaaaagttgtgcgtcctgcgacgattgcccgcgtgatggaggcagtcaacgtgaccgggtacattcccaacatgctggccggggtttggcaaccaaacgtaccaagctgattgccgtggtcgtgccgcaaatcaataacaatatgttcgttgataccgtgcaggcaatcggggatgagctggccctgcgtggctaccatatgctgctgtgcatcgtcggttatacccccgaatccgagaccgatattgtcgccacgttgctttcaagacggccggacggcatcgtgctgaccggcattcatcattcgtcagaccttaaaaggatcattctcaacgccaatattccggtcgtcgaaatctgggacatgacgccgactccgctggacatgctgattggcttctcacacgacaaaatcggtcatgcgatcggccactatttccttgagcaaggctttacccgctttggtctgatttgcgcctccgaccgccgcgcacaggttcgtaaaaagggtgcgatcgatgtcctgcgtaccgcaccgagcagctttatccgcgagataaccgtaccggctccggcaaatatgcaggtcgggcgcagcggtctgggccaactgatgcaaaacggtgaagagtatgacgcgattatctgcacctcagacacgctagcacagggcgcaattatggaggccgaggcgagaggcatgcaggttccgcgcgatcttaaggtcattggcttcgcggatttaaactttgcagcctataaccgcccggcgatcaccaccatctgcatcgataaggtcaaaatgggccagcaggcggccaacatgttagccgataaaattgaaggctatccgattgccgaaagcgtcgtcgatatgggcttctcgctggttatacgtgaatcggcctaacaccctgagtttccccgcacgcttttctgtctaggcgtgcggaaaatttccgcagtatttaatttttgcgtcattcttactctgtttaaaactgaactttactcagttttattaccctctcctcaagcctaaattccatatcattaaatgaaacaaactcttatttgtttattttgttataaatgttagctaacaaaaccaacatttaatatcacaaactttcagcatgaaattatattttccagagaggagcgcaatataaaaaatgtaccaaatggaacataataacatttatttggcttttattgccttatgaaaacccccaccaaataaaatcataacattatgttttttatgaaaataaaaacaataaatcattgcacataacatttaaaaaccaatgaaagcttaattaacctgggatttattcatttatttataatgttgcagtgatattataattcagtacccaaccacaataataattaacccactcctaacatttaagcctgtgagagtcgtattgctatgctcctacaaaagaaaaccacacgtcgtaagttcttactcggatcaataatggcattgcccgtcagcgccattatgatgaaaggatttactgccgcgcaggcagcagaaatggccgccccgaattactcgactataaaccggtctttttcagcgccgatgagtggcagtttattatggccgccgcggaccgcctgatcccagcgggtggcaaagggaaagccccggcgcactcgaaaccaatgtgcctatttttatcgaccagcaaatgcacggcgagtttggcagtgaaatctatatgcaaggtccgttcaacgtgcacgctcccgcgactatgggttaccagttgccttatcgccctcaggaaatctacaaaataggtatccgcctggcagaaagttggtgccagcagacgcaccagaaggcttttcatcagctgtctgagctggagaaagacgacgttctgacccagcttcagaaaaacgttatcaaattcgccgacctgggtgagcagtctctcgttgcctcgcagttcttcagcgagctgctgtcggatactaaacacggttatctcgcagacccgatttacggcggtaacaaaggcatgaaggcctggatcgccatcggcttccccggtgcccgtgcgagctacaccgagtgggtgaaacagcacaacatcccttatccactgggcccggtcagcctgacgggtgcacgcgcctaagccgaaactggctggatttccgttttctgatgatttgacaggattaataatggcacaagtaacgaaagaagaagtcgacgtcgtcgtcgtcggcctcggttgggcaggctcattgatgagtatcgagctggcgatggcaggcctgaaggtccgcgcactcgaacgcggcggtgaccgtagctacgaagattttgcctaccccaaaccggcggacgaatacgcctacgcggtacgtaacaaggtcatggctactcctgcagaggccgccgtaacggttcgctacaacatgagcgaaacggccttaccgacccgtaaatggggcgcgtttgcaccagggaccggcgtggggggtctggcctacactggacggcggtacttatccgcccgaccccaaccgacttgaagctcaagacctatgccgatcgggcttataagcccggcattttacaggaagacatgcgtatcatggacttccccttcagctgggatgagatcgaaccctactacaccaagttcgagcatatttgcggtcaatcgggtaaaaccggcaacctgcgcggccaaatcatggagggaggcgacccgttcgaaggtccgcgttcagagccgtatccactgcctgccctggaagataccctcaacagcagtatgtttgccgacgtggcgaaaaagatgggctatcaccccttcccgaacccgtccgcctgcgtatctcgcgcctggaccaacccttacggtaatcagatagcaccttgtaactactgcggttattgcagtaaatacccttgtctcaactactccaaggcctcgccgcagacggcggtgatggacgccttaaaacggagggagaacttctcctacgaagtgcatgccaacgtgctgaaagtcgtgttgcacgatgacaaaaaaaccgccaaaggcgttatctacatcgacgcgcagggcaacgagtgcttccagcccgccaagattgtggtgctgagcagcttccagttctgcaacgtacgcctgatgctgttgtcgggcatcggtaagccttacaacccgattacggaagaaggtgtggtgggtcgtaactatgcgttcctgagtaacggcggctcgacgctgttcttcaaagacaaaaactttaacccgtttgcaacggcaggcgccaccggacagatgatcaacgacatctcaccgggtaacttcgacggtccgggattaggcttcatcggcggcgcgaaaattcacagttctcaggccacagggacgccaatcagcacctcgctgccgaagggaacgccgagctggggaaccggctggaaagagggcatggaagagtggtacggccattcgatgaaaatcagcatcaccacgacttgccagtcgtatcgcgatatttatctcgacctggatccgaactacaaagacgaatacggcatgccgctgctgcgtatgaccttcgactggaaacagaacgaactcaagctacagcagtatcttaaagggatcgtgggcaatatcaccaaagagctaaaccctgacagctacagcgaaagcttcctgccgatggacgcacactttgacctgaccaaatatgtctccacacacaacgtgggtggcgcggtgatgggggacaatccgaaaacctcagcgctgaacaagtacctgcaaagttgggatgtgcacaacgtcttcgtgccgggcggcaacgcttttccgcaaaacttccaggctaacccaaccgatactattggcgctattacgctaatggctgcacaggcgattaaagatcactatctgaaaaatcccggcccattggtacaggtataagtgacatgaacatgatgaatctcaagagcttcttatttgctaacgtcgtctttatgggagcaggctttatggcacacgctcaggccgatgacgcagcgcttatcaaacagggcgaatacgtttcacggctgggcgactgcggggcgtgccacacgacagcaggcaggccagccttttccggcggactggccatcaggtcgaacttaggcactatttattcgaccaacattacgccggataaagaccacggtatcggcggctacagcgaacagcagttctccgatgcggttcgtaagggcgtattgcctgacggtacgcggctgtatccggcaatgccctaccctgattacgccaaaattaacgataaggatatgcacgcgctctacgcctatttcatgcagggtgtaaaaccgagtgccgaatcgccgccaaaaaccgaactcagcttcccgttcagccagcgctggggcatgcgcttctggaactgggctttcacctctgacaagcctttccagcctattggtggcgcatcggctgaggtcaatcgtggcgcttatctggtcgaaagccttggacactgcggcagctgccatacaccgcgtggccttggcatgaacgagaaagcactcgacagcggcgatgctcaattccttgctgggggcagccttaacgggtgggaagtcccttccctgcgcggtatcgcacactggaatgaacaggaaattgttgattacctgggcaaaggtcgcaacgacaaagccgccgtgggcggtgagatgacctcggtggtagaaaacagcaccgcctatatgaccgaggctgacctgaaagcgattgccgcttacgtgaagtttttgggtggaaaccctccgctatcggcggaggatactcagtcaaacaacgcaaccgaggccagactgaccgcagcgaaaaacctgagcgtcggcgaacgtttgtatctggacaactgcggagcatgccattttgtgaccggcaaaggggcgccgggcgtcttcccgcagctgagtcaggcgacaattgttaatgcgcaggaccctacgggattgatccacacaatcctcgccggtgcgcaacagccctctaccgcacgggcaccgtctacgctggcaatgccaggctttgcggcacgcctgtctgacgacgaggttgcccagctctcaacctttattcgtcaaggttggagcaacaaggcgccgcctgtgacggccgatgaggtgagtaaggtacgaaaaagcctgcaaccttgatcgggctctgaatgaccaaaagatgatttttgtctgaaatccccttaaaaccctgacggcttcctgactaaggaagccgttttttatttccccttggccaacgtgaggttgctcacaaagcgaccctgtgcagcagatttttctatgttagcagcatctctttaccgctttatgtggatatttagcgctaagttaattccacgacccattggggggtaacgaggtgaatcatgctaaaactcaataataattatctcatgtgttgcctgttctttttgttcttctttattggatggggaagttgttatccctatctttcactgtggctcacggacactattggcattgattatgccgacgttggcctggtttattcctttactgccattgtctctgtctgcgtacagcctattttcggatttgtggccgacaaacttatatttagaaaaaatctaatgtggatgctggcgattattattacgctattcgccccttattggatttggatttttgctccactgcttaaatacaatgtcatactcggtgccttggcgggcggcatctatattggttttgcttttggtgcaggctgtggcgtgtgcgaagcctatatcgataaagtcagccgcatgacgggattcgaatttggtaaggcaagaatgtttggcggtattggtgcggccatcgccacctttatggcgggtattctctacggaatagaccagaatctcatcttctggatggcaagctgtgcaggggttattttattgttcattgtgtggaagaccaatccacgtgtttcaatcaatgatgccgcacaggggagccgacgcgcgcccgtcacgctcgaagacgtgcgtaatttaatgaaaatgcgcaagttttggttcttcgccctctacatggtcggcgtcggcgcggtgtatgaaacctacgatcagcagtttgccatttactacagccatttcttttccagtaaagcacgcggcgctgaagttttcggttatctttacacggcacagatatttcttgatgccatagtcatgttcttctcgccgtggtttgtgaataaaattggccccaaaaatgccctaatctactgcggtctgatcatgagtcttcgtatcattggttcagcttacgcggttggacctgtctcaattagcgccgtcaaaatgctgcatggattcgaaagttcggtatttttagtcgcgggcctaaaatatatcgctaaaaactttaacccatggctttcggcaacggtgtatttaatcggcttccagttctcaaaaaggtttagcgaaatatttctttccagcgctattggccatatgtataaaaactttggctttgcggacagctatttggttctagggcttatcgccctttcatttacgctcatttcctacttcacattagataaagcacgcgcttttattcctcaaaagacaatcactgaataatatcaggaggcagtatgtcggcgatttactacggtgtggcctattatgatgaatatatgcctgaagacaggctggcagcagatattagcatgatgaaggatgccggtattaacatcgtgcgtatcgcagaatcaacctggagtacgctcgagccgcagcaaggagagtactgcttttatcatattgaccgcgttctggacgccatgcacgaggccggtattgcggtgattatcggcacgccgacgtatgctattccctcctggctggcgcgtaaacatcccgaagtgatggtgactaccctcaagggaaaggaaaaatatggtcgccgtcagattatggatatcgtcagccccgtttttctgcgctatgcggaaaatatcatccgcgtattgctagagcacgtgcacaagcatccggccatcgtgggctaccagctggataatgaaaccaagcactacgataacgtcgggccagtgatgcagcaaaaattcatcgcccaccttcgcgaacgttatcctgaccttcaccagttgaataaggattttgggctggattactggagtaaccgtatcgaccattgggaggatttccccccgtcgagaacacgattaacgccagcctgggctgcgctttctcgacctttcagcgtcaaacagtgaccgattatctggcgtggcaaagccagatagtaaaagaatatgcgcgtccggagcagtttattacccataattttgacttcgaatggcgtggttactcctatggtgtacaacctcgggtcgatcatttctctgccgcaaaggcattaaccgttgccggtgtggatatttaccatccttctcaggagcagctgaccggccgtgaaatctcctttggcggtgacattgctcgagcattgaaacagggagccggatattttgtgctggagaccgaagcccagggatttgcgcaatggacacctttccccggccaacttcgcctacaggccttcagtcatatcgcctccggcgccagaatggtttcctactggcattggcactctattcacaattcattcgaaacttattggaaaggcctgttgagccacgatttctcccctaaccctacctatctggaggccaaaaccattggcgcagagttggcaacgctgtcggattacctggaggacatgaaaatcgacaatgaggtggctattctggtgagcaatgaggcgatggatgcgttcaactggtttaaacctggtgacgcgcaaagcaacgtttataacaacgtttttcgccgcttttatgacgcactttacgacagcaatatttccgtggatatcatcaacgacgtcaattcagacacctcgcgctacaaggctatcgttgttccagcactctacgccgcctctgacgcgctcttgcaacgaatcaaccactatgtcgaatcgggaggccatgcgcttatcagttttaaaagcggcttcagtgatgaaaacgtgaaagtcaggacccaaagccaaccgggtgttattaaagcgtgctgccgagtcagctacagccagtttgttctgccgcaggatgtcggcctgaccagccaggtgggtgactttacccttgccgacgatgagcgcgccgagttatggatggagctgctgacccccgatgacgcggataaagtccaggtactcgcccgctatcagcatcccgtttggggaaaatatgccgccataaccgagtcgcaatacggtaaggggtcggctatttatatcggttgcctaagcagtaagccggtgatttcacagttggtcaagcgcctgacccaaaagggctctttggcgtcttgccacacggctcacagtttcccaatcattgttaaaaaggcactaagcagggcgggtaaaacactgacattcttctttaattactctttagaaccgcagcagataaccgcgccagaaaacagcgtttgcctgctgggcaatgcacccgcgtcttctaacggccatcagcctatagaaccctggggagtgcgcgtttaccaatcggaagtcgagtccccaaagtaaagtgccattaatctctcacttaccggcagccaggcagggcaaatggaatggaattgaatcagcaagacagggtgagctattcaccattgatgaaaagtttcaccttcaatgcctatctggtggccggttatacgccaatatcacgcgccagcccgcttgattactacataaaccgccccggtggcatgaagggttatattttacatatgaccttaagaggcgaaggcaggataaaagccggcaatcgatacatctacagtcgtattaacgatctgtttctctttccacccgatgttgcccaccactatggccgcgcagacaacagcgagcattgggatcatctatggatatattttcatccacgtccctactggctagactggctacgctgggacaggcttgaagataatatcggcgtgacgtcgctcaataacccagccttaacggggcagattcaggactatttttgggaggtcatccagcagaatgccagcaacgaattactcagcgaggctctggcaatgaatgcgctggagcgactgattatctcgtgtttcaagctgcagcccgcctcaaatcaccaaagcgtagacccaagaatcagcgccttatgccattacattaccgatcatattgccgatgagttgacgattgaacatctcgccgggcaggtatttttatccccttcccggctggcacatctgttcaaaaaggagatgcagcaaaccctattttcctggcgggaaaagcagcgcatcaaccgcgccagaaaccttcttcagtcaacgcacctggcgattgggcaggtttcccaggcggtaggttatgaggatccgctctatttttcgcgtattttcaggcatcacgttggcgtgagtccacggcaatataaaaagcgctatgagcagagaatcactatttgacgcggcaaagattcacccccttaaaaaggtcggggtgtaatcggaaaatttgcagattgatatttataaaaaaagccccgactgtctccagccggggctttatcattcaaccaagcgcgagcgcttatttgttgtctagtgcgtaggcaataacgtagtcaccgcggtctggtgactggcgtgcgccgcctgcagagataaggatgtactgtttaccggttttcggtgaaacgtagctcattgggccgccgccgctgcctactggcagacgcgctttccaaacttccttaccggttgactcatcgaatgcacgcaggtagtagtcctgagtaccggcgatgaataccaggccgccctgagttgccagagtaccgcccagagtaggcatacccacaggcattttaacccgcattttgataccgaatggaccggtgtcctgaacagtaccggccggaacctgccagacgattttctgagtattcaggtcaatcgcagacagtgtaccgaaaggtggtttctgacacgggatacccagcggagacatgaagcggtctttgttgacgccgtaaggagtgcctttcagaggaacggcgcccataccggtgttaacagactcgccaccgttgcttgcagcaacgttgttgttgttctgcttgatcatctgtacccataggcccagacgcatgtcattaacaaacatataatggtgattcgggtcgaaggacatgctgccccagttcatcccgcccagagaacctgggaagctcagagacttatcggtatctggcgcggtgaacagaccgtcataacgcattgatttgaagctaatacgacacatcagctggtcgaacggtgtcgcaccccacatgtccgattcggtcagtttctgattgccaattgaaggcatacctacagagaacggctgagttttagagtactgctcgttaggaatattacgcgtcttaacaggcagttctttaacttcggtcagcggcttaccggtcaggcgatcgagcacgaagatctgacccgttttagcaccgatgataacggcgggtttagtcgtaccgtctttcatcttgaagtcgatcagacttggctgcatcggcaggtcaaagtcccacagatcgttatgaacggtctgataaacccacttctctttaccggtcgtcgcatcaaccgccaatacggaggcaccgtatttgtggtccagcgcgttacggtttgcaccccaaaggtcaacagatgggctacccataggcatgaacacggtgttcattgctgggtcgtaagacattggtgcccatgagtttggcgtactgcgaacgtaggtctgacccggttgcagcttcgcgtttggatctggattgcctgggtcgaacgcccaacgcatttgaccggtgataacgtcgaaaccacgaattacaccacccggcatatcggtttgtacgttatccgcaacacggccgcccaccacaacggtggtaccggcaacagttggggcggaggtcagctggtatttaggatcgcctgcttcacccagaccggctttcaggtcaacaacaccgttgttaccgaagtctgaacagaactcaccgttgtcggcgttgatagcaaccagacgcgcatcaatggtgttcatcagaatacgacgctgacaggtgtcaccggcagccagtacaggctgcggtaccggcgtagagtttggcaccgttggctgtacaacaggcttagtcgcatcgaagtaggccagaccacggcaacggttccaaacctgtgcctgcgcgttgatttcacgcttccagatttgtttgccggaatcgacatcgacagcgatgacgttgttgtgtggagtacacaggaatactttgtcgccaatctgcagcggagtttcctgatcttctgcaccgtttcctcctgggctgattggggtatcgccggtgtggaaggtccaggcaactttcagatctttaacgttgttacggttgatctgatccaacgccacgaagcggttaccgcctggggtattgccccagttgctccagtctttttgctctttggctttatcaacaggtaccagaggcagctcattaccattagaagcaacggtcggatgcggctggaacatctgcacgaaggttaccaccatgcccacggccaatacggcagtcaggacgtaggacagcttggcgaaactcgccttaccttcttttttacgcaggattggccaggtagcaaagcctaacagcataaagcccgtaggcaccatcaaacgggataccagtggccagaaatcccaacctgcatcaaagaatgaccagatgagggttccaaggaacaccagaacgaacaggactacagcagaagatttaccacggaagtattgaatagcagataacaccatcacaatgccggcaatcaagaagtaccagctaccaccgagagaaaccagttttccaccttcaatggcgaagaacaagccacttacggtaagaataacccctaaaatacaacaccatagcctgagtatgaggctcgactgggaatttaatccagacatgcaggcactctccaaaaaaatttattttgatagtaattacaaattgtaatagttactacggtcttctcaaggatgaacaacttaaatatatttgcgtcaaaacatgagcgcggcattgtaccacctgattcgttttagtgttaacgctataactctttctgaccaatttattaacaattttgtacaaccaccctgctaaagatgcggttattcagtacgttaacccaaaaaacctcagggtcgaatttgtaacggtggtgtatgtcagaccacacacttagcatggatatctggtcataaattgacatgattaagcgttttttcacgatgaaaagcgggattttggggcgcagcaggaacaataaagtgttatacgaaacaaaatgttaactaaacgaaccagaaaaaaacggcgttttttcgctacagtttgaaaatagtatgaatgcctgctcccacgccgcttagccatactttcctctgccagtttactgcggcgtgacaaaaccaatttctttagaaatacgctgcgcgatgtcctgcaccgcctcggtgagcgccttcgtgccgacctgtttgagtttggcggtcggcagagagaccgacacgctgtatttcacctgctggtgcaggtcgaaaaccggtgccgcaatgcaggaaacccctagctcgttctcttcgcgatccatcgcccgtttaaactggcgaatatcggccagttcctcctgcatcttcgacagttcggtcagcgtattgcgggttaaaacctgaatctcatcctgatgcgtttgccagtagtggtcggtgaactggctctgctcataggccataaaaatcttacccatcgccgaacagtagagcggcatgtgctgcccaatgtaggcccgtgttctcatcatgccggtggtcggctcaagcttatagataagcagcacgtggtcatcttcacgggttgagaaattcaccgtttcgccggttttcagattcagctgttcaagatgcggtgcggcaacgtggatgatattgagcgatgtcagcgccttctggccgatagaaattagcttggtagtcagccggtaacttcccggagaaggcgcgggcgtgacatagccgctggcgtgcagcccctgcaacagtcgatgtaccgtgcttttattcatatccgccagctcggccagatgggcaagcggacagccgttggggaaattgcccaggatctctatcagctgaaggccgcgaaacagactttgactgcccagaggtttctctttgcccgatctctcttcatccgctgttttgtgactcatctcatatttccctcgtttaaaagtctactcatacggcttttcagcacgctcaccaaactgtgttaccggtcacatttaagcaacattattattaaccttatgatttatagagtaaataaaatcattcacaactttgattatttcactcaatgcgcatagtatttttgaaatcaggtttcgcatattgaaatttatcgtgtgattctagaccagtcgtttatctctttccattttgtttgttggtaactcagcgtagcgttcaaaagggcgtaaagatgcaaagtgacaatcaaatcagtgacgatcggcccatcctctcgatgcaacatatcgtcaaacgttttggcggcaacccggcggttaatgatgtcagtctggaggtgctacccggcaaagtgctggcgctgctgggggaaaacggtgcgggaaaatcgacgctgataaaagtgctggcgggagtttatacccgcgacggcggcgacatcctgtttcagggcaaaaatattcattcggccaatgacctcaaaaatggatccagacagccgatcgcctttatccatcaagacctgggattaatagaatggatgacggttgccgaaaatatggcgctggtgatgggattcccgaggcgtttagggctgattaactggaaagccattcgtcagcgcgcgctcaatgcgctgaaagaggtcggcattgcccttgaccccgacgcgcgggtattcgaactgtcacgtaccgaaaaatcactgctggcgatcgcccgtgcggtggcagtcaatgccgaacttctggtgcttgacgaacccactgcctccctgccagccaatgatgtccgccatcttttcactgttattaaccgactgcgcgccaaaaaagtcggcatgatttacgtcactcaccgtctggatgaagtgattgagattgccgacaacgtctgtgtgatgcgcgacggccgatacgttgccggaggtaaaacttctgactattcgctgcgcgaccttgtcaacctgatagtcggtgaaagcgttgaggatgaccagcgcgagccgctgcctgtcaatcaaccgccggtgctccagctcgatgacgtcatcgttggagaaattggcccgctgagcttctcgcttcaacccggcgaaatgctggcactcgccgggttgcgcggtgcaggacaggaagaaattggccgactgctgtttggcctgcgcgaaaaaacccacggcaacattacttttcgcggcagtccgttcaaagccagtacgcccgccgacgcaattgcgcgcggtgtgtcactggtcgccggagatcgcaccggagaaagtctggtgatgaccatgagcgtgcgggaaaacctgtttctcaacccctgcatcgccggacatcggctgttctcacgctacagcaatcgtcaagaaacgggcgcgagctggtggaaagtgcagctgttcgacatccgccccaaagacgtcaacaccaccgtcagcgccctttccggcggtaatcagcaaaaggtggtcatggcgcgctggatgaacctcaatgcaccgctgctgatccttgaagatccgacggcgggcgtggacgtcggtgcgcgcgccgaaatctatcatctgcttaataaatcgctggccgaaggggttgcggtgctggttatctcgaccgatttcgaggaaatagcccacatctgtaatcgcgcgctggtatttaatcgcggcaacgtggttggcgaactcaaaaatgaagacgtcacctttgccaatcttttggagttggcgtctgccagcaccggggaaattcttgctacatcctgaatacactcatctcgtttcactgtgtccggcttaagcgtttaaaagaaccataaggcgtcaatgtcatgtcgaaaacatctattaaatcaaccgctctcgagcagcgcgtcagccttcgccagcacggcgcaggcgcatggagtatgcaagtcctcacccgctacggcctgctgctgttgtgcattgcgctggtgatcttcttttcgctcgccaccccggccttcgcttcgatgttaaccctacaggccatcctctccagcaagtcaaaaattgcactgctggcgctggcggcgactatcccgatgatagtcggcaagattgacctcaacgtcgggttcggcatcgtgctgtggcacattctcgccatcaccttgcaggtgcaatacggcttctcgtgggaatttgccgtggtggcggtgctgattctgtcagcgctttacggtctgctgaacggtattctggtcgcgctggccgacatcgacagcttcgtcgccacgctcggctccggcaccgtgctttacgctatcgcactgtggcactcgggcggacggcaaatcgtcggcgacctgcccgacgcgtttaccgccctccatcataccgaaatcgccggtatccccattgttgccttctacgtactgctggtcgcggtggtgctgtggctcatcacagaacacactccgcttggccgctgcatgtacgccgtcggtggcaatcctgcggccgcgcggctgaacgggatttcggtcaaccgttacaccatcggcgcgttcattgcctcgagcgtgcttacaggcttcaccggcgtgctgatagcctccgaacagggcgtaggccaggccagcgtcggcatggattatctgctcccggcccttgtcggtgcattcctcggcagtaccactatccgccccggccgcgtcaacgtctggggtacggtagtcggcattgcggtgctcgccatcggcatcgccggtattcaacagttcggtggcgacttctgggtcgagcctctgtttaacggcgtgacgctgctgctttccatcacccttgccggttacgcccagcgccgacgtctgctgaatcaaaaagcggtgcagcgcagtcaggcggtcactaaaaaagagatgccccctacacacgaagccgatcaacgcccttaagtcattttggagaacaataatgaaatcaaaaactctcttggccgtcctgatatcaggcagcgttttcttaagttcgaccacagcctttgccgacgcctatctcgacagtgcaaagcaggccgtcgacaaggccgtcacgccggttacccagtgggacgggccgacctctggtcctaaattgcaggccggtaaacgcatcatctttattgcctccgacatgaaaaacggcggcgttcagggcgtgcagcagggactcagcgaagccgcagcggccgcaggctggaagcttgaaacgctcgacggcggcggctcaataaaagaccagctttcttcgctcaaccaggcaattgcccagaagcccgacggcattgtcatcggcggctggaatcctaacgtagccaaaattccgctgaaaaaagccgtcagcgagggcatcactctcgtcgcctggcacgccgtgcccgagccgggtccgatcgccaaatacaacgttttctacaatgtcacctctgactcgacgcaggtcgcgcagattgccgcgcagtatgcggtggtgaaatccgacggtaaggccaaggtgcttatctttaccgattcgctgtatcaaatcgcgctggacaaggccaacgtgatgaagaaagagatagaaaaatgcagcggctgccaggtgctagaatttatcgatacgccgttggcggacaccgccaaccgtatgccttccatgaccttcagcctgctgcaaaaatacggcgataatttccagtacgctttggcaatcaatgacctgtatttcgactttatggccccgtcgctgaaaactgccggcaaaggtggcgaaaaagcgccttataatatttcggccggtgacggctccatttcggcgtatcagcgtattcgttcgggcgacagccagtcggcaacggtgccggaaccgctaaaactgcacggctggcagttgctcgatgaactcaaccgcgccttcgctaaacagccgccttccggctatgtcacgaccccgcatctggtcacccgcgacaatatttccagcgatggcggaaagaacaatacctttgatccgcaaaacgattatcaggggcattacaaaacaatttggggcgtgaagtaacgcggggataaaccatgtccgaactgaactggcgggagaataaacttgagaaactgtgctcaccggccatctgggccgaagggccggtatggttgccgtaccagcaggcaattgtttttagtgatgtaaaaggcaatcgcatgtttcgctggtcggccgaagacggcgtcagtctgtttcgcgcgtcgtcaaattttgccaacggtaacgccctcgacgccgatgggcgtattgtcagctgtgaacacggccgtcgcggtattagccggaccgacgcacagggtgaagtcacactgctcgtcgaccgggtcgacggcaaacgttttaattcacccaatgacgtggtggtgcgttcggatggcacaatctggtttaccgatccccctacggcattattaacgacgaggaaggatttaaatctgaaagccaggttatcggttgttatgtttactgttttaacccaagaactcacgccctgagcatcgcgaccagcgacgtgcagcgccccaacgggctggcattttcgccggacgaaagcctgctttacgtggccgatatgtcgatagtcgactttcctaccctcggtcgccgtgagctgcgcgtgtttcccgtagaggagaacagactcggcatcggccgcttcttcgccgaggtggctcccggcattccagacggtttctgcatcgatgagcagggcaggattttttgcagctgtgaagacggcgttatcatttttaatgccgacgggcagcgtatgggtaaaatcccggtacctgaacgggtttcaaactgcaccttcggcggcgagaacggcgacgaactgtacatcaccgcaacaacctcactttatcgtttaagactcggccaacaataacctcaccggtgagagtcctgctcaccggccttttattaatcttgcttactgcgccataacttcacataaaaaaatcacagcgtaatttcatcccgccttcaccttctcgtgacgccctgcctgctgctttctaaacgacaaaggtgagctacgtcacggcgcaagaaaagagccaaaatcaccgcctttttttggtgatgtaacagatctgtgaatagcatcccaaatccagaatttgaatgttttttaatcttgcgtgaaatagtcacgacacctcacaataaaactactttactaaaacaagtaaagctggaaagtacatcacggtcaatttataaaggaagacaaatgtctgatctcaaatttgctacccgtttaaactcttttgcctctggggcacacctttactggccaaaccaacagggcaaaccgtcggttatacaaatgattgagcgtgcttcgacggttaaagggttaacgcatctggatctcaattacccacaacacattactaccgatatcagaagcctgcgtcagcgtatcgaagacgtgggactggcggtcaacggcatgcaaatgcgttgggacgctccagaattcaagattggtgccttcaccaaccccaatcctgaaatccgtcgtaaagctatcgaactgactaaacgcgggatcgacgcgggccgggaatttggctccaacctgatgaccctgtggatgggccaggacggcttcgactattgcttccaggccgactataaaaagatctgggaagacgcagtaagcgcggtgcgtgaagtggccgaatatgcgccggacgtggatgtcagcattgaatacaaacccaacgagccgcgcgcatacagcatttttcccaacgtgacgacctgtctgatcgccgtcgaagaagccggatgcccgaatctggggatcaccctcgatttcgcccacgtgctctacgccaacgagatcccggcctacgccgcggcgatggtttcacgccgctcgcgcctgctgggtctggactgcaacgatggctggggcaaacgcgacgacgggctgatggtcgcctcggtcaatccgaaagccacgctggaattcctttggcagatgcagcgcgacggttatcagggtgcgtattacttcgacaccttcccggacgccagcggtctggacccggtgcgtgaggccgaagcgaacatcgcgaccgtgaaacgcctgctcaagctgtgcgaaaagctggacgataaccaggcgctgcgtgcagccatcggcgagcaggacgcggtcgcgtcgcagctgattatcaatgacatcatgttttcataaccctcatccctacacggggcgtggcgtagtgcttcggcgcggcaaatcgtcctgaaaacctcataaaaataaaaggatagaacatgaaaaagtttcttttactggccatcgcctccgccctgtttagctcaagtatttatgcggcggagctggctcccctacagtccgataccgagccggacagaactgactggacccagctcgatagcaaatacggcgcgatgcctaagcccgatgccaagctaaaaatcggcggcgtgtccaaaacgctgaccaacgaatactggcgctcgctggggcaaggctataaaaacgtcgccgataaagacggctttaccttcgcctatcaggcagcggccaatgaagatgaccagctcggccagctttcaattgccgaaacgctgattgctcagggctttaatggtctgctggtttccccgcagaccgacgccaacctgcaaccggcgtatgacgtcgcacagagcaaagggattgcggtggttaacgttaacgatgcggtgatgccaaacgcggcgcactacgtcggcaacgtgcagaaagacaacggcgtgcgcgtggcgcagtggtttatccagcactatccaaacggcggcagcgtcgcaattatcgagggacaacccggggtttacgccgcaggtcagcgtaccaagggctttcgcgagacgatagctgccaacggtaaattcaaggttgtcgctagcgtaccggccaactggagccgagaaaaagcctacgatgccgcctcgaccattttgcagcaatatcctgatttaatcggtttctacgccaacaatgacggcatggcgctgggcgtagtcgaagccgttcgttcggcgggtaaaagcaagcaaacggcggtgttcggcaccgacggcatctctgacgcctacgcctccatcaagcgcggcgagctgaccggtaccgtggacagcttcccggtgctgaccggcgaagtggcgatggacgtgatgctgcgcctgatagctggccagaaaatctcccgcgtggtgtccacaccgcaggctttaattaccaaagataacgccgacgccttctcgaccaaagacaacgagaaactgcgccagcttcttgcacaacaaaaataataattaaggcagcggagggggtatggaaaattatcgtttaaacatgcagggaattaccaagatttacggaaacgttgcggccatcgaagggatcaacttttcggtgatccagggcgaggtgcatgctctgattggcgaaaacggcgcgggtaaatcgacgctgctgaatatcctgtcgggcgttcgcgaagccaatacgggtgagatcatggtcgacggcgaggtcgtcaaaatgaagaacccgctctcggcacgtcaggcggggatcgccatgatccaccaggagttgcagcatgttccagaactctccgttgctcaaaatatgtttttaggtcgtccgctaaccaaatataaaggcctctttgttaataagaaagcccagcttgagcgcgccagaacaatcctcaagcagctagatccgtcgattaatcccgacgaacctatcaagaatttaaaagtggcccaacagcaaattgtcgagattgcgcgtgcgctgctcgacgatgccaagataattgcaatggacgagccgacctcaagcctgacgccaaccgagttcgatcgtctggcagaactgatttcggacctgaaatcgatgaaggtatcgataatctatgtctcgcacaaaatgaacgaaatcttccgcatctgcgaccgtgccaccatcatgcgcgacggccgacaggtcggcgtggtcaacatcagggatgagaccgaagaaacccttgtctccaggatgattggccgcaagctcgagaaagtacagcaccactcctttatgaccgacagagatattctgcaggtcgaggggttggggcgcggcgacgacgtgttgcccgccacctttagcgtacgcgccggtgaagtgctgggcattgcaggtctggtaggctctggccgcaccgaactgctcaaactgattgccgggatcgacgccaaaacctgcggcggtatccaggtcaacggcagaccaatacataatttgaacgtctccagcgccatcaaagccgggatcggcctggtgccggaagaccgcaagaaagagggcattatcaagcagcgttccgtggcggtgaatatggcgctgccgaagatgcgcaattacacccgcgctgggatgttgcaaaagtccaaactggatcaggcggccctaaaagtgatgtcagagttaaaactgcgtccgcttgataccgaaaaacatatcggtctactgagcggggtaaccagcagaaggtcattattggtcgctggatagccgccgacacgcaggtatttctttttgatgagccaacccggggaattgatattggagctaaatcggaaatttataatctgattgagagattagccagtgaaggcaaggcaattattgttgtatcgtcagagatgcaggaaatcatgcgtatatctgaccgcgtattagttatgcgcgaaggaaaaatagcggccgaattaacgggcgaagatatcagtgaagaaaatatcgcgcaatacgccattaatgccgttttccataaaaaataaccctgcaaaactctgcaatgcattatgcagagagtgaaagacacgaggctaaaaaatgaatactcaaggaaaaaccatgccggctttacgcacatcttcactgcttaaattcaatcttcgcgacaccggtacgctgattggattattgattatcgtatgtaccttctcggcattatcaccggtattttttaccatacctaatttattgaatatcttgcagcagtcgtcaattaatgccgctatcgcactgggcatgacgctggtaattatttccggagggatagacctgtcggtcggttctaccgccgcgctgtcggccattttcggcgcaacgctcatggccgccggtattcctgtcccactggccatcgtcggcacgctgggcatcggcgcgctgtgcggcctgttcagcggcgtgctggttgcctatgccggacttcagccgtttatcgttacgctaggcgcactctcgctgttccgtgctctggcgcttatcacgaccggaggcagtccgatttttggcattccggtggagtttcgcagcgccatcaccggcacgctgtttggcattccctgcccaatcctcatcgtggtggtcatcgctatcgcggcctgggtattgatgaacaagacgccgcttggtgaatacatcctggcggtgggcggtaacgaagaggcagcccgcgtcgccggggtgccggtcaaacgcactaaggtcacggtttacgttatttccggcgttctggcggcattggcctcgcttatcctgatcggtcgcctcggcgcggcagaaccgacgcttggcaacctgtgggaacttgacgctattgcggcggcggccataggcggcacctcgttaatgggcggcaaaggcagcattatcggcactatcatcggcgcaattattttaggctcattgcggaccggcttaacactaatgaatatacaggccttttatcaattgcttgcaacgggtctcatcattattatagccatgctgattgaccgagcgacacgaggtaagtaatgaagcaagacccgcgagcaataggtgctcatattagaatgaggttgccacaactcacgccattagaaagaaaagtagtcgagtcaattacgtccaaaagtgatttgtcagagcagacgtcattaaaagaagtggccgtggaaaatgccgtttcagaagcaatgatcgttaaactggcaaagaaattaaacttctcgggattccgggaattcaggaccagcctgatttactacaataattctgatgtggcaaacctgcattctgaaattgggcctaatgactcgtcggaagaattacttgagaaagtttttcgcacctcgattcaggcaatagaagaaacaaaaacaattttagatatttccgagtttaatcgtgcagcagatattctctttaaagccagacacatcgacttgtacggtgttggcggttcggcgtcggttgctcgcgacctgtcgcacaaactgctgaaaatcggcattaaggcgatggtgcatgatgatgcacatatcatgatgatgtcggcggctattttaagtgacgacgatgtggtgattgcaataagtcattcgggcatgactcgcgcggtgatcgacccggtaaaactggcggccaggaacggtgccaaggttattgctatcaccaattatgcgcagtcacagttggctaaagatgcccacgtggtgcttaattcgacctcgcaagggtcacatttactcggagaaaacgcggcggcgcgcattgcccagctcaatatactggacgcgctgtttgtcgcgattgctaaaaaagacctgaagaaagcggcgcaaaatctcaataagactcaacaagcggttaaaaacttaagagagtattagcatgagtaagctcctcgtcgtcggcagtctgcattacgatattatggtggacgcgcaccaccgccctgagaaaggtgagacggttatcggcaccggatgttcattcaaatttggcggtaaagggggcaatcaggccgtttctgcggctcaggcggggtcgaggtggtattttgcggcgcagtcggcgacgatgagcacggtaaatggctgctcgaggtgttgaaaaaaaatcacatcgatagccaacgggtggagattattgcgggtgtcgcctcgggtatgagcgtggcaaccactgacgccgagggcgattatggtgcggtggtgttgtccaacgccaatacgcgcatcgacgcagcacagttctcgaatgctggcgtctggtcaaacgttggcatgctgttactgcaaaacgaattaccggaagaggtcaatttacaggcggcgaaagcggccagacagcgcggcattccggtgtgcatcaatgccgccccggctaaactgttatcgcccgcactgcaaggctgcattgacctgctagtggtcaacgcggttgaggcgcgcgatatgtcgggtatgacggtagaaagtctgcacgatgccgcactcgccgcgaaattactcaataaagattatcctaccgtcatcgtaacggcgggtggactcggcgtggcgtacagtgaaaataaaggcaatgttcaggagatagaagcagaaagagttgagctggtcagcacccacggcgcaggagactgttttatgggtaccctttgcgcgtcaataatgcgcggcgagacactaagcacatcggtcattaatgcgaataaagccgcagctcttcacgtatcgcgaaaacactagatacggtgttagccaataattagataacgcctgagtgaatcatctggataacaatgcctcccaaagccaataacttatggctttgggctggcagggttatttagaccgcctgagcaactatctggttggtgagggtaccgataccaccaatttttacctcgatagtgtcgccgctcttcataaacagcggtggcgttctttttttacctacgccgcccggcgagccggtgatgataacgtcacccggagaaagtgggctgaaacgagaaatatattcaatgatatccgcaacggtgtggatcatatttccggtggtgtcgttttgcacacgcataccgtttagataggtctcgattggcagagcctggggatcggtaatttcgtcggtggtcaccaaccatggtccgaagccgccagtttgtctccagtttttacctgcggtaaaccaggtgtgttgcatatcgcgcacggtggcgtccatgaaacagctatatccggcgatataatccagagcgttttctttcttcacttcgctcgcgtaacggccaatgactaccgccagctcaccttcataatcaaactcatcgctggtagctggtttgataagattatctttatgagcgctgaaagtgtccgggaagcgaataaacaaagtcggtgcattgttattttcttcgaactcttttctcttatcagaataattcatcccaacgcagaaaatctttcctggggtttcaataaccggaaggaaaacaatgtcatctgtcgcgtaatcggcaggagttccatccaattcatgcaggatgtttaatgcattgtcatttaaaagagattgcagcgtggaataccgatcggagaatcttcttccggcatcaataacaccatgttcagtaacaataccgtaagacttttcatctgactgggggcgataaaaacttgctaatttcatacaattccttagatcaacatcataagcagcctgtcattgcacgccacctattagatctctttattcagctaaaatgaccacctggtgttaaacgacaggatggcgaccgagcaaattgctgcagcacatcgtgtgtgcgtaattttctcacagacccaaagatattgcacagtcaaactgaagataatcgtactattattagctaaattaatgcagttatagcatttttgttaaaaatatatttcaaaacaaatcaaaataattaataaaggtacgcaatcatttaattacgtaccccgcactaatcagctcaaagtctttttaatcatactgttaacctcactcctcaggccgagtaagaaattagcctgccgagggtagtgtttaaaggtgatacgcattcccgccatgcgctcgatcagcgcttccacctcctcacggctggtgacggtttccagcagttgcagtgcgcgcagatcctgtagcgcttccctcagcaccacgaggcgcagagattctatcggctgataatcctcgccgggatagactacaaaaagatcgccagaggggaaagcgccctgcccgtcggtaatggcaaagggatcgagatgctcaagcgagtgcccgctgttgtagaagttaaatccccagtgcagaaaaccggtaatcgaataaagataaagctgtacgcctaaaatccgattgcggtaagagggcatagagaagaaacggtttgcgacatcgagcttctgcacgcagcagtaataggtccaaagatccggcaccttatgttgcagaaacggctctatgtggtcactcgcggtcaccggattttgcaccagcccctgctgatagaactcatagtctgacagcgcatccaatactggaaaccctttgatcaacgggcgaataagttcgcttgcccgccgataggcgtcgatatcctccatcttgggctcgtcagagacgtggaaccaggcgtgtttctgcaaccccctttcacgcagccaatcgcacagtgcgggcagaaatgcctgcaaaaagtcgcggtattcggggccctgagcgtcggtctcccagccaaatgcccggctcagtcgcccttctctctcgaccgtgatttttggcgcatgattagcgccccactgggtaaaaagatgtgaaatctcgaaggtagtgatgccttcctcttggcacaactctacccatttttccagctgcgtgaaatcaaaccgataaccctcgccgacctcctgactgacccccaccagctgcaccgtagtgcgttcaccgccgatagccgtatcgagtggcggggtgaaaacgggtgtcagcagcatattgacgccgttgcggaccgcacagcgcacaaagtttctcaccgccagccaccactcggggctgaacaccgcaatgcgatagacgtcggccaggcagtcggcgtgaaaccactcggtgtgcagcaacgtttgcgctggaagggcctgcggtaaaacgtcaaggctaagactcgcgtcgcccagcgtcttcccactttccacgtcgataatacgcaggcagaccgcactgtttccggcaggcagggtttcgttttctggcgaaagcgttagccacaggctgccataataattgccgttcacaaaaaaggtgttattcggcaatggcatcagcggatcgggaaatagccccggttcaacggtcaaataatcgtcatcaacggtttgatagcaggggaaaagactgggtacatgcctgacctgccgcaccgatatgttttctgacaacgtcccctggatttcaaagcgcaatttacggcgaggttcatcatcttctttatgcaggcagtagacacactgaaaagaaatactttcattgtttaacaatgaaagatgtttaatcgatataaaatcaggacgtgatctctgatgaaatatcttttccagactatgagtaaaagacagtgaaagattcataatagtcagactcgcggggccagcggaaaatatgaatatttagcctgccatttttttaatcaacagacaataagggaataaattaaatcagcagtgggtagatgagagcaagtctcattaataatcttcttcgaatacccatctcacactttaggctcgcgagagatcattttttttgtttaatggcatcacaaaaatgaaagatttatccgcatgcacaataaaagcttttttattccccattgtagtgcagggcttgtgcggcaatctcccggtgtaactggccctgataccgcttgttgtctggaagtgagacccaaaatgttatcgaaaagttacaacgcggcaggctttcatctttcgcttttagcctttcgtttttaacaagatcgaaagcaatccgcactgatttagggcaaaagtcgtgatattgacacaccgaaatttaggggatagaaagaatgtacgttacgacaatgtttatttttcgaacgaccaaggggatgtcaatgtcacgaacaaaatgcaccgcctttttatttaaaccggctttatttagccgtagcatgattgcctcagcgatattattacccgccctgttttctttatctgcccaagctgccgatccggtgacattacgctatgccgtgtgggataaaaaccaactggcggcagagcaacagattgctaaaaacttcgaaaaagaaaaccctgatattaaaattgatattgaacttactcccgccgctcaatattttgttaaattagatgcagcagcagccggcggtgttgcacccgatatattctggataaacatgccgtactttatccagtatgccaagaatggattattagagccgttaaatagcgacatcgaaaaaagcaaattagatatgaataatatcgtcgctagctcggttaaagcctatcagtataaaggacagcagttagccatcccgcgtgacgtcgattccatcgcggtctggtacaacaagaaactgttcgatgaagccaaggtcagctatccaaccaatgactggacctgggaccagctcaaggccaaggcaacccagctcaaagccggcctgaaaggggacgaattcccgctggtaatggacctcagcaacgatggtcaggacagttatcttaacctgctctatcaaagcggcaataacgtcgtgccgaccgacggcaaacccaccgacatcgccaacgacaagtcaatctgggtctaccagcagctgcaggaaatgatgaaaaccgggctgctacccaccgcgcagcagatgagcgaagttaaaaccgaaaacatcttccagtcaaaccgcgccgcgatggcctacgccggatcctggcttgctgcaccgttcgccagcaatccgttgattaacgaccatattggcgtggtgatcatgccaaaaatcgatctccaatctggtgtagcccacagtctcggatttgccctgtcggccaagagtacgcataaagccgaagcctggcgctatattcagtttatgagctcggagccgtctcaggaaatcctcgccaaggcggttatccctgccaataagaccgctgccaaagcctgggccgccaacatcaagaacgtcgacgtcacgccttatatcgaaacccttaactttaccaaagcctatccaacggccggtaccaacacaccgaaatggcaaaacatgtggatagccagcctgaagcgcatcttcatgggcgcggacgccaaacaagagatggacaagtcggttaagaaaatctcacgggtcatggaagagtaacgcttagctaaaaagtccctaaacaccttccagccgcggagatgacacccggctggagaaggtttttgcacacgaactgaggtattcaccatgtcgcttgcagaatcggtttccgttgcggtgaaacggcaaaccgccgttacccaaagcgttgacgccacgtctaccaaacccgcccgccgagtgctgactcgcctggagcgcgccgaacgcttttggggctgggtgatggtcctgcctttgctgatagggctgctggtgttttactttgtccccttcctgcaaaatatcttctacagcttcaccgatctcgatcagttcatgcactggacgaccttcaatctcgacaactaccgcgacctgtttaccgacgacgatttttactcggcgattttcaatacgctgttttatgttctggtctgcgtgccaattagcctgacgctttcactgctgctggcgatcggtcttaaccagaatattcgcggcaaggcgctgttccgcacgctgctgttcttgcccgccgtcaccatgcctgcggcggttgcgatggtctggcagtggctgtttaacaaagattttggccttatcaactacctgctgcacttcttcaatgtgtcggccattggctggctttcggaccctgaagtggtgcgcctcagcgtttccatcatcattatctggtcctcgttagcgctgaaaatcatcattctgctggccgggctacagaacattccaaaatctatttacgaggcggcggacatcgacggcatcggcacactgcgccgcttcttctgcctgaccctgccgatgatggtgccgacgctgttcttcgtttcagtcatgagttttatcgaagtgctgcaaatcttcgacgttatctatctgatgtttaaccgctcgatggttgagaacgacaccatgaccatcacctatttgttcttcaagaatgcgttctacctgcaggaaaaaggctacgcctccgccatcaccgtggtgctgtttatcgtcaccatgctgattaccctcattcagatggccatcggcaaacgcctgaaagtggcataaggagtaggacatgagcctgttttcaaccgcctctcaagaactgcccggcagcgcaatggcagcgaagaagttcaacgctcaaaaatgggcggtgtacgcctttatgctgctcgccagcctcgcctcggtagtgccgtttctgtggatgctgatcacctcgctgaaaacccaagccgagagcattcagatcccactgcaaatgctgccttcgcacccgaacttctcggcttatgggcgcatcctgcacgagatcccgttcaccgagttctatatcaactcgatcctctcgacctttttcaccgtcacgctacagatgatgatcgccaccatggccgcttacagctttgcgcgactgcattttcgcggccgcaacgtcgtgttcgtactgtgtatttcgattctgatggtgccgggtcaggcgtttttgatcccacagtttctggtggtgcagaagctcgggctgctcaataccctgaccgggatgatcctgcccggcatcttcagtatctacgccactttcctgctgcgtcagttctttatggcggtgcccaaggagatggaggaagccgcgctgatggacggctacaaccacttcgccatcttctggcgcattatgctgccactgatccggcccggcattattgcctgcatcatcatcaacggcctgtggagctggaataacctgatgtggccgctgatcgtcaataccagcagcgacaaactcacccttcccgtcggcctggcgtcgctgtcgagccgagcgggggaagagtatccgatgctgatggcaggcgcgctgatggccattattcccatgctgatgctgttcattctttttcagcgctacttcattcagggcatcgccagctcgggcgtcaagagctaggcctttttatccatcacactattaatgtaatgccctgaagggggaggactgaaatatgactggaatacagctgcacagcgttgaaaaagtgtatcccaacggttttaaagcgctccacggtatcgatctcgagatccacgacggtgaatttatggtgtttgtcggcccgtcgggctgtgcgaagtccaccctgctgcggatgattgccggtctggaaagcgtcagcgaagggcaaatcgtgattcagaatcagtgcgttaacgataccttaccgaaagaccgcggcatcgcgatggtatttcagaactacgcgctctatccgcatatgacggtctataaaaatatggcctttagcctgattggcaaggagagcaaacaggagatcgaccgacgcgtgcgtgaagcggccgaaaagctggaaatcaccagcctgctacagcgcaagcccggccaactttcgggcggtcagtgccagcgcgtggcggtcggccgtgccatcgtgcgcaaacctaaggtgtttctgtttgatgaaccgctctccaacctcgacgccaagctgcgcgtctcgatgcgcgtacagctgatcgacctgcataaccagctgaaaaaagaaggcgtcggcgcaacgatgatttacgtcacgcacgatcaggtcgaggcgatgaccatgggcgaccgtatctgcgtgctcaaccgtgggcagataatgcaggttgataaaccggtgaatctctaccattcaccggccaatcgattcgtggcggagtttattggcagcccgtcaatgaacctgcatgacctcgcgttaagccgtcagaacggagacattggcctgcgtcttggcgaacacgcgctgctgacgctgccgccagaacttcaggctcagctaggcggttatcaccacaacgaagtctgtcttggcatccgccccgagtacctgcgccgggtcgaggccgggacgccaaacgcccttgccgccaccatcatgaccgttgaacgcatgggcaatgaagagctgctgcactgcgacattggcgggtatcgctttatcactcgcgtcgcgacgcggcacgactgggatcctttgctgggtgaaaaaatctggctggatttcgcactcgaccgcgcgcacctgttcgacaaagaaaccggcctaaatctaaaacagcgtcattaaaaattacggccttttgttcgcctgaaacaagtggagaatcgcaatgtcattaacctcatcttcagttaaacccgtcagtgtgttggtggtcggcgccggtgcacgcggggaaatttattcacgttacgcgctggcgcatcccgagctgatgcgcgtggtggccgtggccgagccgcgtgacgtctatcgagagcagttcgtcgcgcagcacgatattgcaccagagagcgtttttaaagactggaaagacgctgcggcggaagaaaaaatggccgacgcggtgctgatttgcactcaggacagtatgcacctcgaaccggcgctggccttcgccgccctgggctatcatatgctgctcgaaaaaccgctttctcctgatagccaggaatgtcgcgatatcgtgcaggcggtgcaacgcgccggggtgattttctcggtcggccacgtgctgcgctatacccgctacacccaaaaactcaagcagctgctgcgtgataaagcgatcggtgacgtggttagcatgcagcacctcgagccggtcggatactggcatcaggcgcactccttcgtacgtggcaactggcgcaacgaccaacattcggcctcaatgctgctgcagaaatcctgccatgacatcgactggatccgctacatcatggataccccatgcgaacaggtcagctccttcggcggcctgcgccattttcgcgccgagaaccagcctgccggagccgccgacaactgcctcgactgcggcgtagagtcacaatgcccctactcagccaaaaagatctacctcggcgacacgcataaatcgacccagggttttctgcgcgtactcacgccggacgtcagtcaggagaatctcctcgctgcactgcgcaacgggcagtacggccgctgcgtttaccgctgcgacaataacgtggtcgatcatcaggtcgtcaatattcagttcgccggtggcaaaacggcctccttcaccatgaccgcctttacccgccatgaagaccgtaaaacccagctgtttggcagtcacggcacgctcgaaggcgacggtcgctttatccgcatcacctcgtttatcgacgacagcgagacggtctatgacgtagacgatatcgacagcatcgacccggcgcaaagcagtaccatgagcggccacggcggcggtgactactacctgatggcacacttcatcgacgccatacgccgcaacgatgccagccagatcctctctggcccgagagagaccctggaaagccatctgatggtctttgccgccgagcgagcacgccgcgaatgtgccgttatcgccgtgcactctgcctgactcgcgaggagaaaatggatgcgctatggatttgatatcggcggcaccaagattgaaatggcggccttcgacgaccggcttaaccaggtattttgccaacgcgttaatacgccgaccgcagactatcagcagtttctggactgtgtgaaaacgctggtcgcgcaggcagacatgactctgcatacgcgcggcagcatcggcatcggcctgcccggcgtgaccgaccccatcagccataaacagctgtcggtcaacgtgccctgcctctctggccactgcctaggagacgacctcgctaatacgctggaccgcccggtgaccattgaaaacgactgccgctgctttgccctgtcggaggccagcactgaacagacgcgtgcgcacgatatcgtattcggggtgattatcggcaccggtgcaggcggcggattagtgctgaatcggcacctctacaagggcaaaaatgggctggcgggtgaatgggggcatacgcctatttctgcccagctggtgcagcgctatgacctgccgctgtttgcctgtagctgcggtcttagcggctgtttcgagcgttacgtttcaggacgagggctgatggcactcagccagcattttcatcatcaggccaccagcgtaccggacctgttgacgcactatcgtcaaggctgcccgctcgctcaacgactgatcgcgatgtatatcgatattcttgccagcgcgttggctagcctgcaactgatgctcgacgtcgatgcgttcgtgtttggcggcggcctgtcgaatattgcggagatctaccaactgctgccgcaggcgatgcgcggctggctattcgctcacagtcaaccggcagcgattttaccgccggtgtatggcgacagcagcggcgtgcgcggtgcggctctgcttgacggatgaagggataaattattttccgccgggcaagcgaaagacaaaacgcacagccagaggggccgtctttcactctgtgcggattgcacggtgaaacaaatcgaaagaacggctgattcataacgtttttggcgctttatacgccatatgttgtgctttcgatttagtctcaatcgaaagaaaaaataaaattaaacatatgatatataaagatttattgtgaaaaatgacgttgattttcagtgttccgtttgttgtaatcaagccgaaacactgaaagcagcaaggttgtcgtaagcggaaacgtggccgctgcctcgggagaataaacgccaatgataaatacgctaaaacgtcgggaattgatcatcgaccagctgtgccgcgaggggtcagtgcgggtcgaagagctcagcgggcagtacgacgtatcgagcgtgaccatccgtaacgacctgcgttatctggaaagaagcggctgtgccgtgcgcgcctacggaggcgccaaactaaacaaacagttcgtgtttgaccgcccgctgcaggacaagggacgcattaatcgcgacgtgaaatacaccatcgcctgcgccgccgccgcgctggtcaatgatggagattcgataatcctcgattcgggttcaaccatcagccagatggtgccgcagctgcagggcaaacaggaactggtggtgatgaccaacgcactgaacattgcgtttgagctggcaagcaatgagcaggtcgacctgatggtgattggcggcagcgtgaggcgcaaatcgtggtcgctgtacggcccatcggccgagcaacacattcgtcagtatcgtttcgacaagctgtttctcggcgtggacggtttcgatttggtcagcggcatcaccacgccaaatcccggcgaggcgcagctgaaccgtgccatgtgcgacgtggcgcgcgaagttatcgccgtggcggatgccagcaagttcggccgcaccagtttctgcatgatccgtgagataggtcagatccagaaattggtcaccgacagcggcattcccgaggagtaccgccgaaaactgcaaagtttaggggttgaggtcatcatcgccgacagctaaagggccggcgtatccaaacattctgtccgttgaatatcctgctaaggagttttcatgcaacaactactttcgctgatccagcgccataaatccggagagccggttggcgtgttctctgtctgctcggcgcatccctgggttatcgaggctgcgctgcgtcaggcacttcagcgaggcagcgcagtgttaattgaggcgacctccaatcaggtcaatcagtttggcggctacaccggcatgcagccgcatcagtttcgcgatgccgtctggcagcaggcagatgcgctggggctgccgcgtgaccgcgtatggctcggcggtgaccaccttggccccaacgcctggcaggataaagacgcagaacaggcgatggcgctcgccgatacgctaatagccgactatgtcgccgccggatttcgcaagattcatctcgactgctcaatgtcatgcgcaggcgatcccttcccgctcggcgacgaagaagttgcccgccgcgcagcgcgcctgtgtgccgttgccgagaaaagctggcagcggcacggcggtgaagcaccggtttatgtgattggcaccgaagtgccggtaccgggcggtgcgcagggcgaactcgaggaagaagagatgcacgtcaccacgccggatgccgtcgaaaccacgctgggcgtgcaccgcagcgcgtggatggcacagggtctcgcagcggtctggccgcgtgtgattgccgtcgtagtgcagccgggcgtcgaattcgacaaccacagcgtagagcgttatcagcctgagcgagcacgtcagctcactcgttttatcgagagctggcccacgctggtgtatgaggcgcactccaccgattatcaacccccgcaggcctaccgccagctggtgcgtgaccatttcgccattctaaaggtgggtccggcgctaaccttcgcactgcgcgaggcgctgtttgccctcgaccacatcgagcgcgagtggctcggcgaacatcaggcatcacacctttgtgcgacgctcgagcaggtgatgtgcgagcgccctgaacagtggcgtcgctattatcccggcaaaccgcatcagcagcatttgtatcgccagtacagcctgagtgaccgcgtgcgctattactggccgctgcctgaggtatcacaggccgtcgaggcattgctggagaatttgcgtcaaaacccggttccgctggcgctgctgagccagtatctgcccgaacaggcgcgcgccattaacgccggaacactctcttccgatcccgaggattgggtattacataaaatcagtgaagtgctgacggattacgccgatgcctgccagcccgctgcgaaggagcacgtatcatgagccactatttttcctacagcaccgactggctggaacagcacaacgcgctgcacaccgcacgcgaaatatggaatcagcccgacctgtggcgtcagttgcatcaacagctcaccgaggacagcggacagtggcagcctttcctgcggccgctgcttgaaaacccgcgtctgcaaattgtgctgtgtggtgcgggcagttcggcctttgccggtcgggcgctcgcgccctggctacgccagcagaccggccgcgacgtggtggcctatggcaccacggatatcgtcgccaatccgcatcagtatctcgaccgttcgcgtcctacgctgctggtatcttttgctcgttccggcaacagccctgaaagcgtcgccagcgtggcgctggccgatcagctggtacctgaatgttatcacctgatgttggtgtgcaatcccgacagtcagctggcgcagtatgccgaaggccgcgacaacgtgctggccgtagtgatgccgaaaggctccaacgatcagagcttcgcgatgacctcgagctttagctgcatgatgctcggcgcggccttgctgctcggcccgcagtcgctcgatgaagcctacccgccgctgaatcggatggtagaaagcggctaccgcctgcgcgaaagcctgcaatctcaggtcaagaagctggcacacagcggcttcacccgctacatcacgctcggcggcagctgttttaccggacttgcggaagaggcctcgctgaagatgctggaactcaccgcgggacgtatcgttacccgctacgactcgccgctgggcctgcgtcatggccccaagtttatggtcgatgaccagacgctggtattgatgatgttttccggcgacggttacgcgcgcaaatacgatcttgacctgtggcacgagctgaaacgcgatggcctggtgcagcagatggtagggctcagcggcgaagccgacgtacaagaccattctgacattcagaccctgcataacgaacgcgaagacgtgtggatgatgttcccttacctgctgttcgcccagatgctggcgatggagacctcgctggcacatggcctgacgccggataacccttgcccaacaggcgaggtgaatcgcgtggtgaaaggggtcacgatttatcactattcaaaacccgtcaatccggccagtgcttccgcactctgacggatatagacgacggtttttttgcgccaattcagggagtttccatgtatttagtctctaaccgcgagatgttaaataaagcgcagcgcgaaggttacgcggtgcctgctttcaacgtgcacaatctggaaacggtgcaggtggtggcagaaaccgccgccgagatgggctcgccggtgatcatggccggtacgcccggcaccttcagctatgcaggaacggattatctggtcgagatctgccaggccgccgcccgacgctataacctgccgttggctttgcatcttgatcaccacgaagagatgggcgatatcgaggacaaggtccggcaagggatccgatcggtgatgatcgacggatcgcacttgccgtttcgccagaacatcgagctggtgatgcaggcggtaaaactctgccatcgatacggtgccagcgttgaggccgaactgggcagattggggggcaggaggacgatctggtggtcgattcagccgacagtttcttcaccgatcctttggccgcgaaggagtttgtcgaggtgaccgggatcgactcgcttgcggtggcgataggatcagcacacggactgtatcagggcgagcctcggctcgatttcgacaggctggagaagatccgccagcaggtggaaattccgctggtattgcacggcgcctctggcattcccgaggcgatgatcgcccgggccatcgcgctcggcgtatgcaaagtgaacgttgccaccgaattaaaaatcgccttcgccgatgcggttaagggctatttcagtgaaaaccctgacgccaacgatccgcgtaaatatatcacgcccggcaagcaggcgatgaaagaggtggtggccgaaaagatccgcatctgcggcagtgcgggcaggctctaatccaatagcgtgatgttcagcccctggtgcctgaacacatgctggcagaggatcttatagctgtcgcggtcaaaatgaggcgtcgcggtttgtacgcctttggccgcctcaagcgtgctgacggtgcccagataaaaccagttgttcaacacgtgatattccgtctgctggcctgatttttcttcgatagcgatccgtcccggatagggccaactgcgaaccttcatcgcctcaagcgccattttgaggcgcgtctggtgctccacccgcgtctctttgccacagcacaggccggcgcagcgccccagagaaaaacggaagcaggctcgcttggccgacagtttctccagccccagcgcgccgtagcagagcttctgctcgtcggcgatatcgcgcagtttttcaatagccgcaaacttggttttaaacaatccgaagagatcttccgaggtcgaaaagtcgagctcgttgctgaaaacaatgcccgtcgtctgatcatcaacccgtagcgagcagagcttgcgggttacgcgcagtcgtttattaaacagcggccgccggtccttgatcatcttcgactcaagcagcagtgcgcctatttccccaaccgtttctacgtactcgatattgcaggtcatgcgcagtagtttcgcctcatccacggctctgaaatgcgccagcacgcggctgcggatattaacgcttttgccgatatacagcggaaacgtctggtcctgcccatagaaaatatagaccccactgcgcgcgggcagcgtctcgagcgtatggcgaaggtgttccggatactggtaaagcagaggcgtattttcgtttggcatagggcgctttttaataagataaacagagctgcgaggcgttttttagggcaaaaaatagacaatgcggattctactgaatatctatacagggttcaagtctgattccgttccatgagtctccagcatcgtgcaaacagagtcagtgtaaataaggaaaataatcagcagaacaatctgaatatttcaaaaaggtaattttttacactaggctttaggtatgtttaacctaatggaaggagcacacaatgagcaacaagcaaaattcccccacctcaaatattctgggcaatgctgagtcttatcctgttccgccgtttaaacagcagaaacaacctttcccgggtctggtgagcgagatgtctccgcgccctgatcacggggagaaatcctatcgaggcagcggtaaactgacaggtcgcaaagcactgataaccggcggtgactctggtatcggccgagccgtcgcgattgcctatgcccgtgaaggcgccgacgttgctatcaactacctccccgccgaggaatcagacgcgaaggaagtgatcgcgttaatcagggaagaaggccgcaaggcggtggcgattccgggtgatatccgcgatgaggccttttgtcagaagttggtgaaacaggcagcgagcgagcttggcggcctggatattctggttaataacgccggtcgtcagcagttctgcgagtccatcaaggatctgactacagaggcatttgacgcgacctttaaaaccaacgtttatgcgatgttctggataacaaaagcggcgctcgactacttgccgcgtggtgcctcaatcattaacaccacctccgtacaagcctataagccgagcgaaatcctgctcgactatgcgcagaccaaggcatctatcgtcgctttcaccaagtctcttgctaaacagcttggcccagagggtatacgcgtaaacgccgtcgcaccgggcccttactggactccgctacaggtttgcggtgggcaaccacaggaaaaagttgaagtgtttggcgaagaagcgcctcttgcgcgccccggtcagccgggcgaaattgcgccactttacgttacctttgcctcggccgataacagctactcgtccggtcaggtttggtgttctgacggtggaaccggtaccgtttaagcttcttttctctctcgatattttgttgttgcatacgcctgtttcaggttgtatttcttaaagaccgacggtctttacacaaggtaaggtatgtcaacgatagagcgagatgagtcctgggctgcgaccatgcgagtttgcatgccgtggcccggaataatggctttttatgatggccgtatcgaaaataaaaggctttatagtcaggaagctaactggcttgatgacggtgcctattctctcggcaccgccacttacgtgatttatcaaggcactgaggccgtggtttatgacacccacatgagccttcggcatgccgctttcattcgtcacactctacaatcccagggtattacagatattcgcgtcgtcatgagtcattggcacaccgatcatgtggcgggcaatggcgcgttcagtgactgtgaaattatcgcctgtgaccttacccgggcgttgctcagcgaaaatcgcgaacgcctggagaccggtaagccaccgattaagccggtggtgatgcctaccgcaacttttcacaattgtttgactctgcatgtcggcactatcgagcttgagctgaggcaactggacattcatagcgctgacggtgtggtggtaaaaatcccttctctgggcctggttctggccggtgacacacttgaagatacgctgacctacgtgacggagcctgataggctcgacactcatctcaaagaacttgcccgttttaaacaatggcattttcagtggctattacctaatcacggcaggtatgaaatcattgagctgggcggctatccgcgtgagcttatcgatgcgacggaaaaatatgtggcccaacttatcaggcttaaaaccgactccagccttgccaatctttcgctgaaggagtttgccgcagagtctctggcaaccggcgccgttgcctggtttgaaccctatgaagccgtacaccggcacaacgtcgaacaagttttggcgcttgagggcacttacgtggactactaaggggtaaatgcccctttttccctgccataacgatccatccccgcttaattttgccttttacatccgttatgcacccttttgattaatacaccggacttatagaaaaatgggtccatattagaacagcgtttaaaagtccaccgctctatattaaacaataatctcctttttatcgaaaaacctctttcgattgagtttttataatttaatcgaggcggacgggtggcgtgaaaaacgcatgatgatattttatgagttattaatagagtgctgttagtttaacctaaaaatcatgtgtttgagatatttaacgcaagagaacttagaattacctaactatgatgactcccggtgaccgcattaaattgcgacgaaaagagatgaaatacacccagcgcaaacttgcatcggttgtgaaggtctcccatgtcacaatttcacagtgggagagctgtgacaccacgcccggtggcaggaacctgtttgctttggctagcgcactcaagtgtacgcctacctggattttatatggcgatacagagacttctcccatccccattgaatccattgccccgcccctggcagagcgcgagctagaactgctgcggcttttcgcttacctgcccgagtctgagaaagaacggcacatggccgaactgcaaagtaaggtcgacgagttcaataagctttttgccgagcttttacacgcaagaaacgagctcaacatataaatattcgcgctaattattggcctggattattatttcatcgattgttaggccaacctaacaaggttgattgatttacattcaacagttaaatttagctaacaataaatataaaccttaaaaaactttatcgaaaatttaatcatttatttacaagattaaatcatgagctcatgaaagttaaggcaaagcgcgacgcatttaatttttatgcatcccctctgtcagttagaaacttatctcttcagatagcctgtttaataaataataaatgcttagtgtgcggtaaacacagcgtattttaccgtcactgccgaaagaatgatggagactgtcgctccctgtaaagcacataaatccgcagggtgcgctggaatcgaggttgagtgcggcggtgtgacttatatctggacgcggcgacagggccgggagtgtctgagcgattcgccccttcttattaactgaaggggcgatatgttaaacaaacatcaacggagacgcgctagttagttcttgataacgacgtcagggaaactcgctttaacgcagcgagtgtaatcccctttggtcagcgcgctaaaatcgttttcctgccagttaacaagtttacatgcataggacttgccacctttattttcagcaacataactatcatccttcacccagaacaacggcatggccgctgagctggcctcgctaaattgtttcatgcctttacaacccagcacttcactgtcaggtacgggtaccccaaattgcttggcaaattctttgtaatactggatacggttttgagactgttgaacttccacgctgccgccacattccacgccaccgttaatgatttgggtggtgacaccaaaaccaggaaccagcccattagccttgtctgccgcattaggctgccagctgccatccatcacagcttgcatgctcggtttagggggctgtggttgaacatagaaaaatattgcactggccaggttgagccaggtgtcggctacgcgatggggttcttttagtaaaacgttcacatcgccaaacatggcttgtgaaaaggcaccatagttgaagttatagctcagttgtttcgccccgcggccaaaatagctcagcgcattaccttgtttgtcttttgcacaaggccaagcttttccctgccaggtggtaggatcacaggtagcacccgtgtatttatcataggacgtttcattcaggcccatttcccggacccaatgcaatccttgttgccactgcgctacatcactttggttggcatgttccccggtttcctgaacaaagtgagcaaacatggtcgccagtgtctttttacaaatcccatcggcgtcctgcccattttcgctatcagcacaaagaacggggaatttcccgactgccttcaagaagttttcataggtgtaagcagggtcgcggtgtgggaagaaggtattccatttctctgccgtcaccaactcttcaacgcgtttcacgttggaaggattgttcgccgcaccgggtttaatttgctcaaccttttcattgctcagggtgcggatggcttttttcactgcaaccagttgcgaggtgtttgtcaaagcatcttcacgctcattcagcgctttctgggtgagttccatacccggttcaggcgcgagtccgtgcagactccacgctgattcccatgcccagccatcgcctggtgcataggccgaaggttccccactacaccagttagcaacctgacattgataatctttgcctttattgctgacaatctcgcccattttgtaatgtttgcctgactggtattgcggatagtcagaaggtccaggcgtagggtctgtatccgggtccgtatccgggtctgtatccgggtctgggcctggcgtggggtcagtatccgggtcagttgaagtgccgatttttttccatacgttttcccagatatgggctactgaggcattcggtttttcacctgggttggcataccattgagattgataatcaccccctgatgggtgactttttctccgccaggataggcttttttaatatcatatttatcataggcatgtagttggaatgacaacaacatgctggcggtaaggagggataatgccatcccctggagtttgtgtgtttttttcacttaagtgcacccttttaaaaacgtaacaatgtgattttgttcgtggtgtaacagagggcgcaaatgtaaacattattaacatgttgaaatattgtttgatatcaaattagttttttagctagagagttcttacctttaaatagaaatttcttggcagaacccatgggcgtgatggaggagtggccagttaaatgtcatgctcaagtacggctttattaaaatcggccatcatcggagtcggttcacgaccattagcagacgctgatgaattttccttgcctctgctctggatgaaaaagtagataatgagatatcctaattattgttttaaccaggagaatgtatggaaagtctgtttgtttacggaacgctgggaccaggccgtcctaacgctcatattctcgaaaagataggtggtacatggcgcgaagggcatgtcgcaggctctcttatcaatgagggttggggagccgaaatgggttatcccggtattattttggataactcaggcaatagcgtacaaggattcctttttacgtcagagaatttacaacgtcactggcaagtacttgacgaatttgaaggtagtcaatatgagcgtgtgcccgtcaatgttactaccgataacggggaaatcgtcagttcctgcatatacatgttaaaaatataattgccttaagcctgctaatctggcctgccctccgttaattagtacaccccgattagtaatgtcttctttttgacccgctccagcgcatctgagagggcaaaacggctcgtatacaacttacctttaccaatgcccaccctgtcaatcttcacagttttccagtccagaaaactatcatcctaagcgggaataggtttggtgaaatatcggatcaaaacacttttaactcaaaaaagctgccatatggatagcgtttaaaatctggataagcttagtaacaggataagtcgtgaaggtggcgaggcttaaatctaacgttttacgagtaatgactgtgaagatgacggacaacgaaaaaagggaacccgtttaaaggctcccttcttgaagttgatgctaaatcgtaactctgtgtcgatttgaatttttgattttcacacccactttctaacgccggtcaaaagacttttctgacccacgttttaagaatgatggtgcccggactcggaatcgaaccaaggacacggggattttcaatcccctgctctaccgactgagctatccgggcaacgcggcgcattaaaccgtaatggccgctcggcgtcaacggctttttaacggattgtcaggataacacgcctgaacgttgctttttagagcaaaaaacattgaaacggttgttttgcattcataaactcattaaagacgggatattttcaatgagttaatcaatatcgcctcaccctgctcagggcatgccaggtgatcaggcatgtcggattcgatgcttttacctgccgcctaataaacaatctggttagcttaaatgctgcttcagataatggataaacgcgctaatccgagctggaaggtgtttcctgtaagtataaacggcataaatatcggcagccggtgcctgatagtcggtcagtaatggaataagatcccctgctccaggtctttctttatatcccaccgcgagcgcaaaataataccctgtccatccctggcgtagtgtacgactgtctcaccgtcgttgctggacaaatccccgttcaccttctgcacatactccttgccgtctttagtaaaacgccacagcgaataatcgctttcgtactgtcgcagaacgatgcagttgtggtgcgccaggcaggtaacggtattcggtgccccatacttctccagataagcaggcgccgcgcacaccacgcgagagttgctcattaatttaatcgcgaccagccgtgagtcgggcggttcaccgacgcgcaggtcgatatcgacgctgttatcaagaaaattgagcggctggctggtgagctgtaaatcgatatccagattggggtgaagccgatgaaaagaagagatgagcggcgcaatgaaacggcggccaaacccaaacgaggcattgagattcaaacggccggttaacagcgcctggctgttggaaactgcgctctcaagctcggcaatctgcgtgatgatcggccgagcgccctcaacgtaacgctctccctctagcgtaagagccagacgtcgtgtcgtgcgcagcaccagctgcacacccagccgttgttcaaggagcgttaaacgtttactgaccgcaggcagggtcaatcccatttcacgtgcgaccgccgtcagactgccgaggcgcgccaacagggtgaaaaaccgcagatcgtcggtagaggacatcattattcactttaagttaagaatgccttaaatatttagcaaattgttgagcaccagtgaagcatttacactcaatcagtccgataaaacatctccagcaacctatctcaataaataaattaaaacagcagaaggcctacagcatgtctgaaagaacacacaaaatcgccgttatccccggtgacggcatcggtaaagaagtgatgcctgagggcatcaaggtgatagagaaagcggcggcaaaacatggtattaacctggaatggcaggggttcgattttgccagtgccgactactatctcgagcacggaaaaatgctgccagatgactggtatgaaacgctgaaggggtttgacgctatctatttcggggcagtcggttggcccgatgtggtgccagatcacatttcactgtggggctcattattgcagttccgacgtgagttcgatcagtacgttaacctgcgcccggtacgcctgatgccaggcgtaaaagcaccgcttgcaggaagaaagccgggtgatatcgatttttatgtcgtgcgggaaaataccgagggtgaatactctagcgtgggcgggataatgttccccaatacagagcgtgaggtggttattcaggagacggtaatgacgcgaacaggcgtcgaccgtattttgaaatatgccttcgaactggcgcaaaaaagaccgaaaaaacatcttacctcggcgacaaaatctaacggtattgcgattaccatgccctactgggatcagcgtgtcgtagagatgggtaaaaattatcctgaggttgatgtcgataagtatcacattgatattctcaccgcgaacttcgtacttcaccctgactggttcgacgtagtggtcgccagcaacctgtttggcgatattctttcggacctgggtcccgcttgcacaggcactatcggcattgctccctctgccaatattaatcccgagggactgttcccaagccttttcgagccggttcacggctctgccccagatattgcgggcaaggggatcgctaatccgattggtcaaatatggtgtggtgccatgatgttggaacatctcggctatgaaaaggcaggcgcagaagtattacaggcgattgaaaaagtattgagcagaggcgcagacgaagccccactgacgggcgacctcggcggtaagggaaatacgcgtgagttaggtcaggcgattgccgacgccctgtaaagcacgcgaaaaatgtggctataaatcaaccgcctcttagagtgagaataaactgcggtaaaatatgatttatctgatgctgagtgaaggtcattttgctttcactcagtgtccccctactgatacacttcctcttattacaaatcttttttaaacataaagttagatttaattaaggggaatcctattgtcttggaatagcctgacttattttggcgacagtatgctattgctgccgagcgggataattatcgccttatttatggcatggaaagtaacgggcagactcactccctgggcctggttatttacttttggcctcaccggcttcatcgtcagtgtttcaaaactgctttttctcggctggggaattggcagcgcaacctatgattttacaggttttagcgggcataccacaatgtcagccaccttctggccggtattaatgtggctcctgagcggtggctatcgccgcggcatccaccgcacgatgatagtcatcggctatctcctgcccgttatgattggaataagtcgagtggtgttgcaggcgcactcgccaagcgaagtgattaccggcttgattttgggactctctgccagcagcctgttcctctatgctcatcgccatcagacggtgaaacattttacgctgccacagctggccattatgttgatcttgcccattattttgctgagcaccggccataaggccaccactcagaacatgattgaacagctcgcggcctatattaccggccatccaccgtggactcgcgtacagctgctgagtgaactgcattaacgccctcttctccggcatcgcttttccattcacgatgccggaaatcttcccagcctaacgtctcaatacaccactttcttattgctgttaaatacctgccatttctccttgatgaaagcgtctatttcacgttgaaaacgctcggcagaaaacctcaatgcatttagaaaaaacaacgcctagggtcactccgtcgatgaaaggacataaattgcctccttgagctaaggtaaataaagagggaactacagaagaggagaaggtaagtcatgggcgtatttgcattaactaagttcaaactacccgttaagcagggaaagaagccgtggaggatagtgataaccagcctgctgttggtgctggtaacagcgattgcagcctgcggagataaggagcctgcacagcgtaaagcctttatcgactttttacaggcgcagattattaccgcacagggaacgaatcttcctgcactgacgcaggaccagaaagcggccttcggtaagtacatcaaagactacgcggtgatgagggattttcatcagaaaatggaaacagagcttaactcttcgctggtaccggtatttagcagtatgaatgcgctaacgtcagtcaatgcgctacttcagcaacgagacgagctgcagaaaatggcagataaaagtccaaggtggcttgaagaaacaaaattgctgcaggttcagaccgacgcgcagagagaggggctgaaacagcctgaagatctgaaaaaaacctatgaccaggcctataacaaagttgtttcacagccctctgcggccgcagaacagatattcacgctgctgccagaagtcttgaaaaacattgttgttaaggccgatttcattaaaagtcagggtaaaactgtcactatttctggtaacaccttgcagtttgccaaccaggctcagctggataaatacaatgcgattcagaaaaagttgttgccgctaaatgcgcagctaatggccttaagccgagagttgcatcgcgcagccgagtaatgcggcggcagtttgccgcccaaaatgcatcagtggcaagcatgtgccgcaggctggccattttcggctcgacgccaatcccccggcgtttggccgaactgacgcttgaagctgcgggtgaaagactgctgtgagtcgaaccccagtgaaattgcaacactgacgatggtttcaccgctgctggctagcatatccgccgactttttcatcttctgggcacgaatatactcgcccatcggcagcccggtatgctctttaaacatgcgctgcaaatgccagcgtgaataacctgcacgtttggccacggttttaatatccaggcgttcttcgaggttgttatcgatccagtcgatcagatcgtgaataaaatcttcggttttcatgtccgctctcccgctgtgttttttttgccctcgcaagagagcctgtgctaaggctgacgcagttttgaataaaatgcaagttttactattgcatttaatttttcgattgcggatagttacacatcaaaacaaatcgccataaagaatagcacataaagtgcaacaataattcttgcactttactaggccactccctacaatcgccatgaaatagtgtatcagtaattgataccttattgtgcctatgacaggtgcaaatccgcataaaaatatcagtcaaaggactcatcgccggtggacaggaccggggaggactgcctgatagcgcgtgttcatcgcaatagataccggacattaaaacaatgattagcctgcaaaatcctttcgtgataccaagcgagcgtcgctctggtacgcatcttgctctccccctttcagggatagcgttggtggttgctttactttcagggtgtgacaacagcgtagcgcagagctcagctccgcctgcaccggccgtcagcgtggccgccgtagtggtaaaaccaatcaaacagtgggacgagttcaccggccgggttgaggcggtgcaaagcgttcaacttcgccctcgtgtctcaggctacatcgacaaagtaaactatgtcgaaggccaggaagtaaaaaaaggccaggtgctgtttaccatcgatgaccgtacctatcgtgcagcacaggagcaggctctggcccaactggtgcatgccaaaaatcaggccaatctcgctcgtagcgaatcggctcgcactgaaaaactggtaggttccgaggcggtatccaaagaactttgggaacagcgtcgcgccgccgccgctcaggcccagtctgacgtgttggccgcacaggcccagctggatatggctcagctcaatctcgatttcacccgcgtaaccgccccgatcgacggcaaggccagccgcgcaatgataaccgccggcaatctggtgaccgccggtgacagcgccagcgtgctaaccaccttagtctcactcgataaagtttacgtctatttcgacgtcgatgaaggcacattcctgcgttatcaggccatggctcgcgacgcaaagcacaacaacgcaccgctgccggtacacgttggattggtcggtgaggagggtatccgcatcaggggatgctcgatttcaccgataaccagcttaccgccagcaccggtaccatccgcatgcgcgccttgctcgataacggcgaccgcagcttcacgcccggcctgttcgcgcgcgtgcaaatgcccggcagtcctatgtttagcgctctgttaatcgatgacaaggcggtgttgaccgatcaggaccgcaaatatgtttacgtggtcgacgggagcggcaaagcagaacgtcgcgacattcagatgggcgcaatgtccggcggactgcgcatcgtgcagcagggtctgaaagcaggcgatcgggtggtagtcgacggcgtgcagaaggtctttatgccgggcatgtcggtcaacgcgaaaaacgtggatatggcgagaaacttaacgccaattgcctctgaacaagcacaataacaggacgccgtctcatggacttttcccgcttttttatcgaccggccaatctttgccgccgtcctgtcgattctgattttggtcaccggggcgatagccataccgctgctgccggtgagcgaatacccagacgtcgtgccgccaagcgtgcaggttcgcgcccaatatcccggcgcgaacccgaaagaaatcgctgaaaccgtcgctacgcctctggaagaggcaatcaacggcgtcgaaaatatgatgtacatgaagtcggtcgcgggctccgacggtgtcctggtcaccaccgtgaccttccgccctggaaccgatcccgatcaggcgcaggttcaggtgcaaaaccgcgttgcgcaggctgcggcacggctgccagaggacgtacagcgccaaggcgtgacgacccagaagcagtcgcccaccatgacgctcgtggtgcatctgtattcaccctccggcaaatacgattcactgtacctgcgtaactacgccacgctgaaagtcaaagatgaactggcacgtttgcccggcgtcggtcaggtgcagatttttggcgcgggtgaatatgcgatgcgtgtctggctcgatcccaataaagtggccgcacgtggcctgaccgcctcagacgtcgtcaccgcaatacgtgaacaaaacgtgcaggtttctgccggtcagttgggcgcagagccgatgccgaaagacagcgactatctgctgtcgatcaatgcccaaggccgtctgaaggacgaaaccgagttcggcaatatcattctaaaaaccagtgaggacggctccatcgtgcggctgcgagacgtcgctcgtatcgagatgggttcgggcagctacgcccttcgctctcagctcaacaataaggacgccgtggggatcggtattttccaggcaccgggtgctaacgcgatcgatttgtcgaacgccgtacgggccaaaatggccgaactggcgacccgctttcctgatgggctgacctggcgcgcgccgtatgacccgacggtattcgtgcgtgactccatcagcgccgtagtgcataccctgctcgaggcggtggtattggtggtgctggttgtcatcctgttcctgcaaacctggcgcgcgtcgattatcccgctgctcgcggtgccaatttcagtgatcggtacctttagcattctgtatttgctgggtttttcactgaatacgctcagcctgttcgggctggtgcttgccatcgggatagtggtcgatgacgccattgtggtggtggaaaacgtcgagcgaaatatcgaggaaggactggccccgcgcgaggcggcgcatcaggcaatgcgcgaggtgtcgggtcctatcgtcgcgattgcgctggtgctctgcgccgtatttgtgccgatggcgtttttatccggcgtaaccggtcagttttacaaacagtttgcggtgactattgccatctccactgtgatttcagcgattaactccctgacgctgtcaccggcattggcggcgatactgctgaagtctcacggcgcaccgaaggacgtaccaacgcggattatcgaccgtctttttggctggctcttccgtccgtttaaccgcttctttaacgccagttcgcatcgttatcaaagcgcagtgtccaaaacgctgagccgtcgcggtgccgtgtttgtggtctacgttctgctgctgtgcgccgccggattaatgtttaaaaccgtgccgggcggattcatccctacgcaggacaagctgtacctgattgccggggtcaaaatgcccgaaggttcgtcgctgtcacgtaccgacgcagtagttcgtaaaatcagcgctctgggcctgcaaaccgacggcgtgattgacgcggttgccttcccgggacttaacgcactgcagtttaccaatacgccgaataccggcacggtgttcttcgcgttgaaaccgctgagcgaacgcagccgcacggcggcgcagattaacgccgagatcaacgccaagctctctcagattcaggaaggctttgcgttctcgataatgccaccgccgatcctcggactaggccaggggtcgggttattctctttatattcaggaccgtgcggggctgggatacggtgcgctccagtcggcggtaaacacactgtcgggcgccatcatgcagacgccgggcatgagcttcccgatttcggcttatcaggccaacgtgccgcagctggaagcgaagattgaccgcgacaaagccaaggcacagggtgtgtcgctcaacgagctgttcagcacgctacagacctatctggggtcgtcatacatcaatgacttcaaccgttttggtcgcacctggcaggtcatcgcgcaggctgacgggccatttagggaaagtgtggaagacattgccaatctgcgcactcgcaacgacaagggtgaaatggtgccgattggcagcatggtcaacattacgactacctatgggccggatccggtgatccgctacaacggttatccagcggcggacctgattggcgacgccgatccgcgcgtgctgtcgtcttcacaggcgatgaccgaggtcgcatcaatggcgaagaatctgctgcctaacggcatgaatatcgaatggacagacctgagctaccagcagtctacgcagggcaatgcggcactcatcgtcttcccgatgtctgtgctgctggcattcctggtgctggccgcgctgtatgaaagctggacgctgccgctggcagtgatcctcatcgtccccatgaccatgctgtcagcgctgttcggcgtctggctgaccggcgggacaacaacgtcttcgtccaggttggactggtggtgctgatggggctagcctgtaagaacgccattctgatcgtcgagtttgcccgcgagctggaaattcagggcaagggcataattgaggccgcactcgaagcctgtcgactgcgtttacgtccgattgtgatgacctcgattgcgtttattgcagggactatcccgctgattctcggccacggtgccggggcggaggtgcgcggtgtgaccgggattaccgtattctcgggcatgctcggcgtgacgctgttcggtcttttcctgacgccggtattctacgtcgctctgaggaagttggtcagcagaaaggcgcagcctgaagccgaggcggtaaccctgagctaatgcaaacgcttaagctgtagaaacaacaaggggactcgcctggcggcgagtcccctttgttttaatcaggaaaggatgttgagcggcaaacaggttgagcctgaagcgctatttagcggccagctcttcgccgccacagctgtagctgccgttgcgttcgaactcgtttagcgcgtcggcgacagtgtatttcgccagtacggccatcgaggcctcttcagcttcatagaccacggacttaaaatagccgcaggcgttggcgctcaccagacacttggccgacccttctggtcgggccgcccacaggcgtttgtcttcgatgacgctggtataaatatcacgcagcgtaatggattctgccacgcggccaaggcggatagaaccggtcctgccaagcgttgaaacgatgatcccttgatgcgtcaggggcaccatcagcttgcgtataaagctgggattagcttccaggctcgctgccagagtcgcactggtacagcgctgtcctgacttttcagccagtgccacactaaagaccatctgcattgctgtcggaaagcgaaaatctaacatgtcgttatcctgggaaagcggtatcaaaaataaactctttcgactgataaaaaactcacagacgaagtggtcaataatataacaaaagctggagtatttttgaagtttggtcagcacagaaaggcctaaaagcggggagttttaatcgcaaattgcgagcacggcggccctttagccgcttttagggtctattgggtcaagggcacgcgccttatgtgcagggcagcggcccagacctgccagtgggactttcaaggcgggagccgtttggattgccccgccttgttctcgcgctaaaaatgcaatttaacaataaattgtcatttaagcgctcaaccatcccagcttgataacaaacagaagcgacagaataaccagtgcggcattcagttcgcgcgcacggccgctcagcagtttcaccagtgtccaggtgataaagccgaacgcgataccgttagcaatcgagtaggtcagtggcatcgtcagggcagttactgtaaccggtgcggcaacggtgatgtctttccagtcgatctcggccaggcccgaggtcatcagtaccgcgatgaacaacagcgcaggcgcggttgcaaatgcaggcacgctgcccgccagtggcgcaaagaacaggctcagcaggaacaagatagccactacgatagcggtcaaaccggtacggccaccggcttcaacgcccgccgccgattcaatgtagctggtggtggtcgaggtgcccaacagtgagccaaacagcgcggcgcagctgtcggcaaacagcgcgcgacccatcttaggaatgttgccctcttcgtctgccagacccgcacgcttggtgacaccaatcagcgtaccggaattgtcgaacacgtcgacgaacaggaaggcgaacaccacgctaatcaagccaacgttgaaagcacctttgatgtccagctgcaggaaggttggtgcgatggaaggcggcatagacatcacgccaccgaacggggtatagcccagggcgatagccagaatggtcaccgccagaataccgattaacacggcgccggtaacgcgacgcgcttccagcaccacaatgatgataaagccaagcatcgcaaacagcggtgcaggcttggtcaaatcacccagccctaccagcgtggcctgattgccaatcacaataccagagccttcaagcgcaatgagcgccaggaacaagccgataccggcggcaatcgccgaacgcagcggcataggaatgctgcgaatgatccactcgcggattttgaaaatagataacgcgaagaaaatacaggccgagaggaatactgcacccaatgcgatatgccagttatagcccatatgcagcacgacggtgtaggtgaagaaggcgttcaggcccatgcctggcgccagcgcaatagggtagtttgcaatgaatcccatcagcgcggaaccgattgcggcagcaagacaggtagcaacaaataccgatcctttgtccatgccggtagcgccaagaatagaagggtttacgaacaggatatatgccatggccagaaatgtagtcaagcctgccaatatctcagtgcgcacgttagtgcgatgagctttgagtttaaatattttctctaacattagatttctctcggtcgcgttgtatgaatacacgcttgttataagttttgtttttcaaaacacgtccgcgagccaggagtccagatgccatagattcgtccggcccttaataagacacacggaaagtactgcgtgttttgacgaaccctgtcatcactgcctgttaatttatagcttacttgtttacttaccacccgacttgtataaaaaacgtctgatgtgactgttttacaaagaagcaccgtacaatctaggaaaaacgggtgatgcagtccataatagatatctcactaattcactgcaaaaattagtacaccctcatatgtcgccattttctcgcttttcacaatactttgttgaagtcgcccgtaccggaagtttgcgtaaagccgccgagacgctgcacgtctcggcatcggcaattaaccggcagattctgctcgccgaacagaccatggaaacgccgttatttgagcgcttgccgaccggtctgaaattgacgtcagccggtgagatgctctttgatgatattaaacgctggcgcaaagagtttattcgcacccgcgaaagatttgatgaaatgcagggattacgccgaggacacgtcagtatttctattatcgccgcgctcagtgagggcatggtcgcgcagctgattgccgatgtaggtaaagaatttccgtatctgacctttaatattcgcattgaggaaagccgcaatatcagcgagcacgttagctcttcggaggttgacttcggcctgctgctcgaccctgtcgagcacaccggtctcgaggtgcgcgccttcgccgaactgccgattggcattgccatgccggtgggtcatccgttagcgcatagaaaaatgctgtcattcagcgatatcaccgagtatcggcaaatcatcccggccgaaccgctgatgatcaacgcccgcgccaaactgctttacaaccgctatcagctgcatgagacgccatcgattgtctgtaatgatgtgagaatgatgcgtgaattgatccgcaaaggtgccggcgttggcgtactcagcctgctcgacgtgtttcccgatttacaggaaaaacgcctggccttcgtgccgcttcagggacacagcgtcaagccgctgacgctggcgctttgcgtcgcgcctcgtcgtcagctttctcgcgcggcgcagattgtgattcagaaaatgatcgtgatgatggaaagcatcgcgctgtagtgtctcaatcatcatcccgtttacgcagcgcgaaccagccagcaatcaccgtaaatagcgcaacaaccagcaccagcagcaaaaaaccgtgcgggttggaggccagcggaataccgccgacgttcataccaaagaaccccgcgacgatattgataggcagtgcgagcacggtgatcacggtcagcacatacagcgagcggttgttctgctccatctgactcgaagaaatctcctcctgaagcaggcgaatacgctccgtcaaccctaccaggtcatttaacactacggtaaattcttcggcaaactggcgcagatccctgactacttcggcgctgagccaacgcggtgggcggttcatcagacgaaataacgccgccggttccggtgccagtaggcgctgaaaacgcagcagttggcgtcgcatacgcccgagccttgtgcggttcttcttaaccagtccgctgagtagacgctcctcaatctgatcgacatactggtttgcctgacgcacgatatgctccagcacgtcctcctgctcttccagcaaatgcaccagcagcgaagttggcgaggtcggtgccagagtttcaagcttgtgaaacaaacgctcaatcagtcgcagaggtttatgacgtgcagtaatcaccagaccggtgcagcaataaagccacagcgtcgccgtctcttcgccagagccgtcctccttaaagttggcgtcattaagtaccgcaaacaacacgttatgctgactctcgatgcgcgtgctgtgtgaaccgttgcggatctcctcgaagaaaaactcctcgatatcaaactgctttctaagccatttttcggaggccgcatgattaagattgatgtgcagccagaggaagcccggggtatctttttgctgctgatattcggcctggatctgtcccgacgttatccgccttggcgtctgatgttccttaaagacaaagccatggattaatcccgtaacctcatcggtaaagtctactttatgcgatttttcttccagcatggtttatctgtattaaccgggaacatcgcttaattacgccatttgccaggataaaatcaacccctttatgccgcgaaaataaataaaaataccaatataaaacataaatttaaccgtcatctttccgtcataaaaatgccacatttggtacgaataatcttaggggattaattggcattcggcatgactttgagggaaagcgttatggctatgcacgagaatggttcacccggtgaattcacctttaaccaacgcttattacaagaattttatgacagctacgacgaagagctggaaatggaactggacgaccgacgcctgggtgacggggagccggaatgcgacgaccagaaagcctggcgtaagcagtatttccgtgagctgctgcgtttgcagggcgagctggtaaaaatgcaggactgggtgatgcgaaccggtcaccgtatggtcattatcttcgaaggacgcgatgccgcagggaaaggcggcgtaatcaaacgcataactcagcgacttaatccgcgcacctgtcgggttgccgccctccccgctcctaacgaccgggaacgcacacagtggtattttcaacgctatatcgcccatctcccggcagcgggcgagatggtgctgtttgaccgcagctggtacaaccgcgccggtgttgaaaaagtcatgggattttgtagcgatcaggaatatgaagaatttttccgcagcgtgcctgagtttgaaaaaatgctcacccgcagcgggatccagatagtcaaatactggttctccatcaccgatgaagagcaggaactgcgcttcttaagccgcattcacgatccgctgaagcagtggaaactcagcccgatggaccttgaaagccgccgccgttgggagaattataccgcagcgaaagaagtgatgctcaaacgcacccacatcgaagaggcgccgtggtggattgttcagggcgtcgacaagaagaaagcgcgtctcaactgcattagccacctgctggcacaggtgccttacgaagagatggaagcaccaaccatcacgctgccgaaacgcaactacagtgacgactacaagcgcactcttctgcctgacaccatgatcgtacccgatctttacgattaatcggcgcctgactccccgatcctgcgcaaaaaagcaggatcggtttatatttcgcttaacacccgtttttcggttagaaaatcgataaacactctaatcttgggcaatagatgacggctgctcggccaaaccatggaaaactttccggcttcgtccagatagtcccctaataccgacactagcgcacccgacgccagatactccttcacaataaactggggtgcataagtcaacccaatccctcgtagcgaggcctgcagtaaaccttcaagattgttaaaagaaagagagctgggaatgctttccgaaaagtcgttattgaagtcccaattctgcaactgcccatttttaggaaagcgatagcgtaaacagtggtgctgttgcaaatcagcgggcgtttggggaagcggatgacgcgcaaagtaagcagggctgccgataatgacaaagcgaaacggcccgagagtgcgtgacatcatctcggagtcggtcagctcaccgctgcgtatggcgatgtccaacccttcggcgatgatgtccaccatgcgatcgctgaagtctagctccagctcaatctcgggatagcgttgcataaactcagacaggtaaggcaacagcatgcgatagccaatcgccggcaggccgacgcgcagcttaccgcgcggctgggccgacaggcgcgacagctcgaattcggcctcttccatttgcgacacaatggcctgacagcgctcaaaaaacagcaggccttcgtcggtcagactgatgcgccgcgtgctgcggttaaacagtcggacgttaagccgcgactcaagccgtgctacgctctttcctaccgccgaggcggaaattcccagccgctcaccggcggcggtaaagctgtggcactgcgccgctcgcacgaaggccaacatgccgttgatattatccatactcacttccgaccctttattagagcgcttttgtccttaatcatcggacaacaagcccatttccgtcaaatttaagacattttatcatcaggcaatatcaccttttctggagaagcccatgagtaatccttctattgccgccgcgccagcaagcaaaatgccggtgctggtcgccgtttgtctggcgggtattattctgccgttgagctttgtcagcggctcgatagccacgccggttatcagccgcgaactcggcggcagcgcgcaggcgttgagctggataactaacgcctttatgctcagcttcggctgtttcctaatggccgccggatcgcttgccgacgaggtcgggcgcaaaaaggtgttcatctccggcgtttcgttgtttgccctgctctccgggctgattggcttcagttcgagcctgctgtggattgatgtgatgcgcgccttacagggcgttgccgccgccgcagcgctggcgggcggttcggcgtctttggcgcaggagtttgagggccgtgcacagatgcgggcattcagcatgctcggttccagctttggcattggattagcgtttggcccttttctggcgggcctgctcatcgcgcacttcggctggcgggcggtgtttctctcctcaatggttatcgctctgctgtcgctgtcgattggcgtctctcgcctgcgcgaatcaaaaaaccctgatgcagcgggcatcgactggcccggtacggtgctttttaccgctatgctggcgttgctgacttgggcgctgatggctattccggctcagggcgcagacagcgcgctggtgctgagcctgttggcggcgaccgtcgtgctgctggtgctttttgtaggggtcgaaaaacgcgtcaaacacccgatgcttgacctgtcgctgttccgctatgcccgcttcattggcgtgcaagcgctgccactggccacggcttttgcttttgtggtgctgctggtgctgctgccaatgcagtttatcggcgttgccggaatgactgaacaacaggccggattgatgatgatggcgctgtcgctgccgatgctatttgtgcctatgtttgcgccattgctgacccactggatttctgccgggctggtctgcacccttggcttgctgatttccgccgtcgggcttggctggctgagtcaggccattcttcatcagaatatgctgggggcgttggtgccgatggtcgttatcggcgtcgggataggcctgccgtggggactgatggacggcctgtcgataagcgtagtgcctaaagaacgcgccggtatggcgacgggaatattcagcaccacgcgcgtcgcgggtgaaggcattgccctggccatcgtcggagcgatgttggcggggtttgtcggtcatgggctacagaaaatcgttcctgtcacccactcggcctcggaaagtcaggcgattcagcgtctggcaaccggtgatttgtatcaggcaagtcttgcgctacccaacgtcagcgcttcacaacttacgttgatctacgccgacgcgtttcatcagctgctgctgtggctagcggctatcacgctggtctctgcggtgattgtctacgcggcgctatgcctgagaaaatcccctgccacagccagcgaaccgctgtgtgaaagggatcagtgaagccaggcggcgaccgacctgaaaatcacgctgccgagaaatacgcctgccgcaccgacgatgccaaccagcgtcggcggtgccggcagcggcagtttcagccaggaaaaaaacagcccgaccgacagtccggcaagcaacgcatagaaaatctgcatggttatctcccagcctgaggattagattcgtgccacaaactggctcagaatcttctgcgtaaaggtacgagttacctcatcagtgagctggccgtcgctgaccttctgtccgataaaggtgatggccacttcaggcaggggatccagtttgcagagcatcgctgccagcgtttcgcgcagctgatactgcgctctgaccccgcccagcgcgccgggggagagtgtggcgaacatgaccggtttaccgaccatgcagctggtaaaggccgggcgcgacagccagtcgagggcatttttcagcacgccggggatcccgtgattgaattcaggtaccaccatcagcaccgcatcggcgctggcaatcaggtcgcgcgcctgatgaacctgagcgggacccacgggagaatcgagatcctggttataatgaggcagttcgccaatgtccagactgacgaactcggaacccgcaggcagcatatcggccagtgagttcaggacaatcttgcagtaggaatcggcacgcaggctgccggccatgccaacaatacgcagggtttagtcataatattttcctttttaaatggcgctccacgtcgtgagcggcgaataaatggcattatgacgctatcagtgataaaaacattcgcataactgacaataagctttgaggttatgccatgtctgcttttaccccgctggaagccaaacgctttacccattcagcaggaacacaggttgcggaacaccgccatccgcaggggcagctgaccttcgtgacgcgcggcacctcatcgattaccacgcgcgacggttggtggctcgctccgccgggtcgtgcaatctgggtgacgccagacgtggcccacgcggcatcctacagcgaattttcagatgtgatccaactgctgatttccccgcagcactgcgtttcactgccgcaagaatgccaaaccttgcaggtgtcagatttgctgcgcgaactggctctcgaggcgctgacctttacggctcccggccgcaacaatgacgatattcccgccatctgccagcttattgtccaccagctcagtgccgccagtgcaggtatcgcgctgtttattcccaaggggcaagatcgccgcttacggcagataacccacctgcttcagcaggatccgggcaataattattccctcgaacaggtcgctgaacgctcaggttgcagcccgcgcacactggcgcgtctgtttcaggctgagaccggcatgaccttcacccgctggcgcgatcgtttacgcgtcgtgagcgccgttgaccggctctcacgcgggcagaacatcacccaggttgcgctggaactgggctatcagagcccaaacagcttctcgaccatgttcacccgcctgttgggtgaaccgccgcgacgctttatgaatcggctgatgcaggctaaaaacaaggaatccagttagagatttttataatcttgaatcacctcaatcactcgctgagcggcaggcgacagcgtattttcagccagataggtgataccgaaactgcgcgccataatgacatcgtcatttttgaccctcaccaggcgtgaggcgaagacttcctcagacaggctgttttccgagataaaactgagcaggccgctttcggcgataagctccggcgcggcggccagcgagctgatttcgatccgcacgtcgagcgccgggcagtgattgtcgaagaaatatcggtcgagccatttgcgcattgccacactcttggcaggcaaaatccagccacagcgactaagctgcgcagcggtagcctctttcccggcgagcggatgatttctactggcggcgaccaccacgtggtcttctgtcactggcacggtaattaccggcttgtcgcccttgacgatcgggccgagaatgaagtccagctcgttgcgcccaagcatgccgtacagcacatcgttcatgccaatctgaatttcgagcttgatgttcggtgccagcagctgcatctcacggcacaccgcaggcagcagaaactgagttgccgatcccgcacttccaaggcgaaccacgcccgacaatcctgcgcccatctcggcgatttggcgcagtgtttcatcgaatccgttttgtaaaactaacccgcgttgatagagcaaacgcccggcttcggtcaattccaatccacgccccagacgtttaaacagacgggtttggcaaagcttttcgaggcgagcaatagatttagataaggcaggctgagttaaattaagattctgtgaggcatatcccaaatgcttgagctctgccactttaaggaagtatatcaagtctttgttattcaactgctattccttaaattcatcgattctataaaataatatattagacgtaatcgattcccacaacaataatcggtttaccacgtgcgcactgaaaaaccaacggaatatacgatttgaaataaaatgtaacttcctgttttatcttagttaaaaactagaagaaataaacaggttttgcaaagaataaagaataaaaaaaggaaaaactcatgtaccttgccttaataggttatattctcatagccttcttgatgtttttcttgattaagggaaaagcagcgccaatatctttatttatattcttatccgttatcgcgggatttgttgcaggatattccccaacgttaatgaatgagtatattattaaaggcgtaatgcaaactgcgccaaacgccgttctctttaccttctcgattattttcttcagtattatgaccgaggctggcgtatttcagcccttggtcaattggctgacgaaaattgccggaaataacgtggtggccattgttaccgtcaccggtattatcgcactggtcgctcacatcgatggttcttcggtgccctctgtcctcattaccatcggtgcgatgctaccggtttaccagaagatgaaaatccgccccgtggtgttgctttgcctgctggcctgcggcatgggcgtgaccaatataaccccgtgggctgggcctctggcgcgcgttgccgccgtttcaggacttgacgttaacgcgctttaccaccaattgatcccggtgcaaatcatcggtttagtctgcgtactggtgctcggcgtggtgctaggttttcaggaaaaaaagcgtatcgccaacaacttgcctattcctgaaaatcttgaagagccaagcaaaaatgtggccgacagcgcgcactcaaccattgaaagcggccgcctgaaatttagtattaatgtcttattagtcattggcgtaacgctgttgctgctggtcactcaccttcaggcctatgtcatatttatgtgtgcctttgccgccgctatgctgctgaattacccgtctctgaagggtcaggaagccgtcatgaaaaaatatgcctacggtgcatatatgatttcgggtacggtgatggccgccggggtattcgtcggtatattaagtggtggtggagataagtctattctgacccaaatggcggatattgtattagctattatgccgaattacctgggtccacacttgcatattattatggggatcgtcggcggtctggtcggtttcgttattggtcccgatgccttcttctatggtatctatccgctggttgccaaggtgggtacacacttcggcgtgtcgtggcaggagatgggctaaccatggtcgtcggcaagaacatcgcgatgatgataagcccggtatttgcgactacctatctggctctgggccttaccggtgttgagctgcgtgaccacattcgctactcgttcgtgccggtttcggtggtgtcgctgattatggtgttctcgctggtattgactggcactgtgccgctgtaaaacagcatgcccaaggagaggggaaatctaaccggttttaacagaaaccgtcagcgtcgaaagacctgacggttttatgcatctgaaggcaagaaattacagcgctttcaggatcttaatcgtcgcgtcgatgtctatctcgtcttcagagaaggtgtaggtgctgttctggaaggtggtaatcagcagcttcttgatggtacgggttgtcgccttggtctcttcgtcttttggcttgatgcggttcatcaacaggccaacagacagaacggcgttctctttatcgattgtagaatccgcaggcacttcttcactgaaggccaggaacgacttgatgctggttatcttgatgcgctcaccggcaatgtgaataaatttgctctctggcatcacttttaccgcaaaggccgacaaccctttggtgttggtggttggctcaaaggtcaccacggcatctttcttgatcaaatcaggattggcgactttaatcacatggaaataacgattatctccgttttcatctttgataaagccaaaacctttatcttcaaaccaggttgtgattacaccgttcatcgctcttaccgcctaataaattcgttcaaaaatgcctgttaatcccgtccgtctttcacaaagtgaggggaaaacagtgaagtcgcccagtttaatgcacattgcccgcgaagtcctgcgctttgcgcgttcactcatgtttatagaacgctaaacggctttgcgaaaggtcagattaaagcggtactgtccggtcaacggatgttcacccgccttcagcggcaaaattccatgatagcgcagtcgcgctggaccgccccacaccacgatgtcaccgtgggtcaggttgacgcgctgagttttatcgctgcgctccataccgccaaattggaacaccgcaggcaggccgagcgagatagagactatcggctggccaaagtcctcctcgtctttgtcctgatgcagcgacatcttggccccaggctggtagcggttgataaggcaggcatcgggctgaaagtctttgaaaccggcctcctccgctgcgtgcacggcgagggtacggaagatgtcgggcattgcgggccagaggcggtgggtttcgggcgaagtagactgatagcgataaccacgactgtcagtgacccaaccgagatcgccacagttagtcatcgcgaccgacatcgcatagccaccggggtagcacgatactgaaacggcacctgaatggcgatattctcaatcgccttgagcagctcgcggtcatcggccagcgccgcaccacgcagcacgactgcgcctgggcacaggtcttcacgccagcttgggtggaaatccgggtgatcgaagagatccagattcatgcgtcctccttccagcttaatcagtctcaagtataacagccccgcgcgcgggcaataaaaaagcccgggacattatcctgtcccgggcctcgatactcagcgtagcgtgcgcgagttaacctgttgccgcaccgtttttctcttcaccgactaatccaaccttcaggtatccggcggttcgcaggttatccatcacgctcatgatggtcgcgtaatcgacagacttgtcggcgcggaagaagatggtcgtctgcttgtcaccctgtgtgcgctggtcgagcaacgccttgaggctgccaggctgaacaggactgtcaccgaggaacatctggttgtcggctttgaccgtcaggaagacaggcttcggcggtctcggctgcgactgcgcggtagatgcgggcagattgacccgcacatctaccgttgccaagggtgctgcaaccataaagatgatcagcagaaccagcataacgtcgataaacggcgtgacgttaatgtcatgcatttcgccgctttcatcgaggtcgtcgttcaaacgaatggccatgattgacttaccctacgcgtaactgatgacccgcctgagcgcgcggtgcctcttctgcacttgccgcgaggtccaaatcacggccctgcagcagcagaatctgggccgccacgtcgccaacctgatgacgatatgacgcgatggtacgggcgaaaatgttgtagataaccaccgccggaatggcggcaatcaggcccacggctgtggccagcagtgcttctgcaatacccggtgcgactacggccaggttagtggtctgtgtctgagcaatcccgatgaagctgttcataatgccccacacggtgccgaacaggccgacgaacggagagattgccccgatagtcgccagaataccgttaccacgccccatgtgacggcccgcggcgctcacgcgacgctcaaggcggaaaccggtgcgttctttaatgccgccgttgtcagtagaaccagcagacagctgtagttcgttttcagcgtcgcgcagcatctggctgcttacgctattggccgagaagccttctgactgttccagcgcttccttcagcgagcgtaccggcagcagtgccgccagttcacgacgcaggcgacgtttacctgagaacacttcagcgcccttgctgaaaagcagggtccaggttacgaccgaggccagcagcaggccaatcatcacgattttcaccacgatatcagcatgctgatacatgcctaatacggagaggtcttttgggatcgcggggacttgcgggtcttgagcaggcgttgcgctaatatcgataccgttagtgctttgcagcaaaggtgccgcgctaccatcggttgaggtggccgcaggggctgccgatgccgaggtcgtcgtggaaggggtaaccgcattggccgcgttcgaagaaggcgtcgcccaggcgctaccggttaatcctgccatcagcaccagtgaggtcaatacagtaccgatttttgctgtaccgcttttacgcgtactcatcatctgttttacatccgtcaaaaatgacaccgctttgttcatcttaatgcgacacgtttgcacgcagcgcctccagccgtgatcaaaggattgaataatttactcgcggcaaatgataacaaattaaaagccataattgatagtggttatcattattatttacattccgcagtagcctgaaaagtaaacactcttactcatatgaaaaatcttcacacatcgcgccaaacccatgaccctgcgcggaggccatgctaacgtaataaaaatgccagatggcagggttaacaaggtgaaatttttcttatgacgtccaggaagattgaaactgcgctggtgagtgcaggaagagacaaaaaatttacccagggttcggttaatgcagttatccagcgcgcgtcttcgctgatgtttgagtccgttgcgcagaaaaagttcgcgaccgcgaatcgggccaacggcgagctgttttatggacgtcgtggaacgctgacccacttctccttccaggaggcgatggtcgaacttgaaggcggtgcgggctgcgtgctttatccgtgtggcgcagcggcggtcagcaacgcgattctgtcgttcgtgaacaccggcgatcacctcctgatggccagctcgtcctatgaaccgacgcaggacttctgctcgaaagtgctgacccggctgggcgttagcacgacctattatccggcctcgattggcgcagacattgccagcatggtccagcccaacactcgcgtgctattcctcgaatcaccgggctctatcactatggaagtgcctgatatcccaacgatcgtcaaggccgtacgcgacgtatctcctgaggttatcgtgatgatcgacaacacctgggcggcgggcattctgttcaaggcgcttgaatttgatatcgatatctcgattcaggcgggcacaaagtacatcgtcggccattcggacgcgatgattgggaccgccgttgccaacgaacgttgctgggaacagctgcgcgagcagtcctatctgatggggcaaatggtcgatgccgacagcgcctacgtcgccagccgtggcctgcgtaccatgggcgttcgtctcaagcagcacgcggaaagcagcctgcgcatcgccgaatggctccagacccgacctgaggtagcacgcgtcaatcaccctgctctgccaggcagtaaagggcatgaattctggaaacgtgatttcaccggcagctgcgggttgttctcctttattctgtccaaacgcctgaccgacgaccagcttgcccactatctcgaccacttcgagcacttcggtatggcctattcgtggggcggatttgaatcgctggtgctggctaatcaaccggaagagatccaggccattcgcccaggtgaagaggttgatttcacggggacactggttcgcgtgcatatcgggctggagcactgcgacgacctgattgccgatttagaagcggccttcgcgcgcattgcctgatcttaatcaaatgattgcgacaaaccgcgcaaaaccttacttatctgataggatggtgcgcggtttttgaacataatacgttaaatacttataaagattgttgatactcttttttaatcgtgacgttggggagcgattcgcgatcctgaattctcacgtttttgcagcaaccagacaggaaagcctatggcggtattaacacaaattcttcatgctttatggcaacacgactttagcgtcttggcgaaccccaacgttttatgggtggtctacgcggtgctgtttgccacattgcttctcgaaaatggtctgattcctgcttcattcctgcccggcgacagcctgctgctgctcactggtgcgctggtttccaaaggtgtcatgagcctgatccccacgctgattatcctgattgtcgcttcagccctgggctgctggctaagctatctgcaaggtcgctggctggggcacacgcgcgtagtaaaaggttggctgcttcaactgcccgcccagtatcatgaccgtgcccatgccctcttcaataaccacggattagccgccctgctcgcggcgcggtttatcggctttgtccgcactctgctgcccactattgccggtatttctggcctcgaaaaccgtcgttttcaggtattcaactggctgagtgcggtgctatgggtggggttatcatgggcatgggttatgcactgtgccatattcctttcgtgcaacgtcacgaagacaaggttatggcaggcttgatgattttacctgccctgctcctggtcaccggactggccggcgcgctgctggtcgtatggcgtaatcgccataaaatcgcctcttaagagccgaataccgtttcggtaatggtctgcgagtttacctcacgcatgcgggcgatttcgtcgctcggcgtaacgccaaagtagcgtttaaactcgcggctaaactgtgaggcactttcatatcccacgctgatggccgcactgctggctttcacgccgtcgtagatcatcattgcccgcgccttgtgcagacgataattcttcagatactgcaagggcgaggtgctggtgacggccttgaaattgtggtggaacgccgagacgctcatattaacgtcactggccagctgctcaacgctgagcgtctcggcatagtgattctcaatcttgcgcagtgccttggttatctggctgaaatgcgtatgacgattcaccaatgcctgcaacgcaccgccattttcactggtcagaataaaaaacaaaatctcacgaatgatctgtgggccgagcaccttggcgcgcagcggcttgtccatcacgtctagcagacgctcgctggcgcagagaatgtcctcatcgagcaaacccgaagtgatccccgaagactggtccggctgatgcgggaacccttcatcgcccatttccatcagaaggtcctgcaacataccgggatcgatgcggatagacacgccggttaccggcctctctggtgtaccaaaggtctcgcattcgaacggcagcggaacggtcagcatcaggtaattcttgggatcgtaggaaaaggttttgttgcccagatagccaatcttgctgccctgaaacacaatcgtgacgctggggttatacatcaccggctgccgagcgtgatagctcgagtaacacatcagcgttgcctgcggcacgctagactgaaatttgggagacgtctcggtcagccgctcgactttttttgccagttcggcgcacaggctttcaacatcttgcatgactcttctccgaataaaacaaactggcaatgattctgccataactcttatgattgctatagcggcttgcaggattaggcaagttttaaacaggaatatgcattataaaaattcgccgggtccgccaaagtctttctctgagcaggttaagcacatttttcggataaatacctgaaaatgaatcattagcaaactcagcgaaatggctattcatttactaaacttactcaatcaggcaattaatgcgtggattacgcattcccctacaggagaaatttatgtcaacgcagtccatcataaagctcaatgacggcaatcgcattccccaactcggcctcggcgtctggaaagccagcaacgacgaagcgacccatgcggtagctaccgcacttgacgcaggctatcgccacatcgacaccgccgccgcgtataaaaacgaagtgggcgttggccgagcgctggcggaaaccagtatcccgcgtgaagagatttttgtgaccactaagctgtggaacgatcagcagctgtatgcacagaaagccctcgaggagagcctcgataaactcaaactcgactatatcgatctgtatctcatccactggccgctgccggatcaggacaactacgtcgagtcgtggaaacagctgctgaaattaaaggaacagggactggcgaagagtgtcggcgtgtgtaacttccatattcctcacctacagcgcctgattgatgaaaccggcaccgcgccaaccgtgaaccagatagagctgcacccttcactgccgcagcgccaactgcacgcatggaacgcgacgcatcgcatcgcgaccgagtcctggagcccactggctcagggcggagacggcctgttcgaagaagctttgattcagaaattggccaagaaatatggcaagacaccggcgcaaatcgtaattcgctggcaccttgataacggattgattgttatccctaaatccgtcacgccaaagcgtattcacgaaaacttcaacgttttcgacttcaagctggaaaaagaagagctgtcagagttcactaagctggataccggcaaacgtttagggccaaaccctgaacataaactgaatttctgatctgaatgcggaagggagcggtgcctgccgctcccttttttattgaatagcctggcgagtttattaatagctcggcgagggttgtatgaccatctgccccatcgaaccgcgatcggcgagctctaacgtctggctgtagaagaagaacgggaaatggtcataggacggctgattgaggtaaaccagcagttcaacctcgccatcaacccacaccgtatccttgaatccagcgtcttctaccagcggtgcagcaccgttaaccgtcttgaccataaaggtcacgccctgaacgtggaatggctgcggcaggtccgcgtgcaccgtccagcgctcccacgtcccttgcaacgcctgaacgtcggtccttgagggatcaaacaccgcgccattgatgcccggctggttatccccaggcggaactcgcggctgcgcacaacgttaccgacgatcagctgatcggcgagcaggcgcatagggagattgtcagtcaccagcggcagcaggccggtaggtttcaaggtaagcacgatggtcgaaaccagaatgcttgaaggctggaacagaccgcgcagcctgtccataatacccgcggcttcgccagcagacaccgacacctcgtcgccctgcgacatatcaatcagcacttcacggcgttcaccgggcgccagagaaaggcgctgcacggagaccggcgcaggcaggaacccttggtcggaggctatcacgtggaatgggcgattgtcggtcagcgtcagctcatagcgacgcgcatttgaggcgttgagtaaacgcaaacgcacccagccgcgcgagacctgcacaaacggactctgcacgccgttaaccagcatggtatcaccgaagaaaccgccgctggcggggtgtcgtactgtggcacgccgaaattatccagacgcttgtcctgaataatcaccgggaaatcgtccacaccgtagtgattaggcagcggcagactcttgctgacgtcatcttccaccagccacatccctgccagcccgttatagacgtgcgcagccatgtgccctggcgtattggcgtgataccagcaggttgcggcaggctgacgaataggcagcaccggtgaccagtcgctgcccgccgacatcaaacgcgccgcgccgccggtcagcgtgccgggaacctgtagaccactgatggtcatagccgccggcacaggcaggcgattgctgtagataagcttaacgtcatcgccgttgtaaacccgcaccgtcgggccgagatacatcccgttaaagccccagaccggtgctttactgccgcccaaaaatgcccaatgcgactgctgaagcgtcaggaaaagaggttgtccgcggcgggactcaatcagcggaggaacaggtaatacgggctgggcctcgcttgcgtttgccctcagcggcaaagacccggcggcaagcgccattccagttgcctgtataaaactgcgacgactgagggacatatcttctccatgaacacaaaatctaagctgcgatatcagcccactgaccttcaatggcggcggaccctataataattacccgccgtgaggctctgtaaaaagcccttatccggcagggaattaaaaataactatttatttttttatcttcatctcggcttcgcgctgcgcaacttccgcatcaagctcggctattttatcggccatcaattgacggcagtgttccgataattcgcgcaggcgttctttaccatactgcgtagtgtcaatcggcggcagcatttcaacaatcaccaaaccgttattccagcggttcagtttgattttgttgctggtgttagacacacagattgggacgatagggacaccggcggagatggctgcgtggaaagcaccggttttgaacggcatcagaccgcgcccacggctgcgggtgccttccgggaacatccagatagaaacgtttttctttttaatttgctcgacaacctgagagatagtgccgtgcgctttggtgcggttatcacggtcaatcagtaggttaccggtcagccagtacagcggcccgaagaacgggatccataccaggctttttttacccacggtcacggtgcgaggctgaacggctttggccgctgtcaccatgtcgtagttattctggtggttagcaatgtaaatacagttgccgtaatgggcggcctcaggaggcgttcgtttttcaaccctcaggccaaggataggtgccagttcgccaaaaagatggccgaaagtcgcaacatgttttggatttcttggactgaaaaggcaataaatagaaccgaaaatgcacaacagaattgagaaaaccacgacataaataaagcgaaaaataaataacataacaccctcttaagcatacaaccggagtcaaactctgtttgcccctgccgttcccttgccgctggactattctcgggcctcagctggctctatacaatagttattcttcacccggagagggtttttattaatccaaataatagcgattgcaacaaacgtaaattatttgtactcaggaataaagattatcaagctcgtgcacaagttgataattatcgtttcattctttgtgaagctgggcaattaagggcaccgaagtgccctgattaaagcaatataagatgcgttattcttcgctgtcaccgactgaaggacgcgccggtccatcgacttcgaccctgtcaatacgctgcaaaccgcgtggcagcagcgtgcctttgcggccgcgttcagcgcggaacttctgcaaatcttcaggacgcagcgtcagcttgcgcttgccaacgtgcagcgtgatagacgtttgcggtgccagcaccagtaaccaggcaagtttatcggctcccgatgcggcatcagccgcagaaattgagacaatcttgttgcctttacccttcgacagctggggtaaatcggcgaccgggaacaacagcatgcggcccgcgctggtaatagacaacagcatgtcgtcgtcacccaccagctcgataggcggcagcgcactggcgttctcaggcagcgtgatcatcgccttgcccgcacggttgcgtgcaaccaaatcgttaaaggtacacacgaaaccgtagcctgcgtcggaggccatcagcagcttctgatcgtcagcggccatcagcacctgctggatagtcgcgcccggcggcggcgtcagcttaccggttaatggctcgccctgaccacgcgccgacggcagcgtgttggtgtccaacgcatagctgcgaccggtggagtcgatgaacaccaccggttgattgctcttaccacgtgcggcgctgcggaagctgtcgcccgccttgtaactcaggccggtagggtcgatatcatgccctttggcactgcgaacccagcccatctcggacagaacaacggtcaccggctcggacggaatgaagtcactttcactcatcgccttcgcttcttcacgctcgataatcggcgaacggcggtcgtcgccgtaggcctcggcgtcggcctgaatttctttgcggatcagggtgctcagcttacgttctgaagccagcagcgcctgcagctggtcgcgctccttcgccagttcgtcctgctcgccgcggatcttcatttcttccagcttggcgaggtggcgcaatttcagctcgagaatcgcctcggcctgcgtttcgctcagcgcaaaacgttccatcaacaccggtttcggctcatcttcggagcgaatgatgtggatcacttcgtcgatgttcaggaaggctatcaacaaaccttcaagaatatgcaaacgcttcaacaccttatccaggcggaagttcagacggcggcgcacggtgtcacggcgatacgacaaccactcggtcaggatctcaaccagtcctttcacctgcggacggttatccagaccgatcatgttcatgttgatccggtagctgcgctcaagatcggtggtcgcaaacaggtggttcatcacttgatcgagatcgatacggttagatcgcggaacaataaccaaacgggtcgggttctcgtgatccgactcgtcgcgcaaatcctcaaccatcggcagcttcttggcgcgcatctggctggcaatctgctccagcaccttggcaccggaaacctgatgcggcagcgcggttatcactgcttcgccgtcctcttttttccacagcgcacgcatacgaaccgagcctttgccggattcgtaaattttgcggatctcgttacgcggcgtaatgatttcggcttcagtcgggaagtccggcccctgcacgtattccagcagatcttcgagcgtgctgccgggcttttcaagcaaggcgacagcagcgttggcaacttcacgcaggttatgcggcggaatgtccgtcgccatgcctactgcaatgccggtggtgccgttgagaagaatgttcggcagacgcgcaggcagcattttcggctcctgcatcgtgccgtcgaagtttggcacccagtcaacggtaccctgcgccagctcacgcagcagaacttcggcgtatttcgacagacgcgattcggtgtaacgcatcgcggcaaacgacttagggtcatccggtgcgccccagttcccctgcccgtccaccagcggatagcgataggagaaaggctgcgccatcaataccatcgcttcgtaacaggcgctgtcgccgtgcggatgatacttacccaatacatcaccgacggtacgggcagattttttaaattttgcgttattgctgagacccagctcagacatagcataaataatgcggcgctgaaccggcttgaggccgtcgccgatgtaagggagtgccctgtccatgattacgtacatggagtagttcaggtaggcattctcggtaaacgtatgcagcgctaaacgctctgtaccgtcatgagtcacttcactcattacttttttatcctcagatccatcgcactgtcgtgctggaaaatgaacgttctggaaaataaggaggcccggttgcagacacgcacgggcgctgtcgcacagggcgatgatgtccgcgatagtacatcatatggcgtcttgctgtcacagttgctgtgttttcagcgaacagtcactgcgcgaaagcgcagctaaaagtcgataaacccctgccaattattgcattaagagcaatagtattgtgctctggcgcacatttttaagcgcaacaatctcagttacaattccctcaacagtttactaatgaggcctatgccatgagcaacatactgattatcaatgccggaaaaacctttgcccactctaaaggcgcactgaacatcagccttaccgaggttgccgattctttcctgcgtgacgctggccaccgcgttcgcgtaactcatatcgaacaaggctacgacgtcgaagccgaaatcgagagctatctgtgggccgacgctatcatctatcagatgccaggttggtggatgggcgcgccgtggacgttgaaaaaatatatcgatgaagtcttcaccgaaggccatggtcgtctgtacgaaagcgacggccgttcccgctccgacgcttcgaaaaaatacggttccggcggccttatccaaggcaccgcatacatgctttccgtgacctggaatgcgccactggaagcctttgaagataaagaccagttcttccacggcgtgggcgttgacggtgtttatctgccgttccacaaagccaaccagttcctcggtatggacaccctgccgacctttatgtgtaacgacgttatcaaacagccggacatcgaaggttacttcgctaactaccgcgcacaccttgaacacgtatttggtcaagcggaagacgctgagtaaatcctgagtttggcaaattctgcgtttattgccacactcagaatgcgccattctcgtgagccgggagtttgtaaggctcacacatttaaagggaaaacgaggtttttatgataaccgttatcgctgaaatcatcatcaagccgggccgtcgtgattcagtgctggaaaaaattacccagctgctgccacaggttctgcaagaaaaaggctgccatcgttatgagccttttcttgacgttaaagggcatatcccatggcgtcagagtgcgcccaactccatctttatgctggaagattgggaaagcctggcacatctggaagatcatcagcaggcggcacacatgcacgcacatcgtgaaaatatcaaacacgacgtcgtggacgtgaagatcaatatcatcgagaaaagctgatctatatctgagtttttcctgatgagaacctaaaaaaaaaccggagctgtaagggctccggtttttttatgtctctaacttgttccacccagtcatgcagaattcaggtgcaccaagagacccattccccgaacaaagcatgaaaagattagactgagagctcagcggtatcgcccttgtcttgcagccagttgcggcggtcttcagaacgtttcttggccaacagcatgtccatcatccgcagcgtctgatcgacatcgtcttcgtcgatggttaactgcaccagacggcgggtattgggatccaacgttgtttcacgcagctgaaggggttcatttcacccaaccctttgaatcgctgaacgtttggcttgcctttcttgcgtttcagttgctcaagcacgccggttttctcttcttcatccagcgcgtagaacacctctttacccaagtcgatgcggtagagaggcggcatggcaacgtaaacgtgaccaccgcgtaccagtgagcggaagtggcgcacgaacagcgcacacagcagcgtggcgatgtgcagaccgtcggagtccgcatccgcgaggatacaaaccttgccgtaacgcagctgggtcaagtcttcactgtcaggatcgatgccgatcgccacagaaatatcgtgaacctcctgcgaggccaacacctcatcggaagagacttcccaggtgttgaggatcttgcccttaagcggcatgatcgcctgatattcacggtcacgtgcctgcttggcggatccgcccgccgagtccccttcgaccaggaacaactcggtcattttcaggtcctgcgaggtacagtcggccagtttgcccggcagcgcaggaccgctggtcagcttcttacgcacgaccttcttcgctgcacgcatacgacgctgcgcgctggaaatcgccagttcggcaagctgctcggcggcctgcacgttctggttcagccacaggctaaaagcatcttttactacgccggaaacgaacgccgcacactgacgagaagaaagacgctctttagtctgaccggcaaactgtggatcctgcatcttgaccgacagcacataggcgcagcgctcccagatgtcctctgcggagagcttaacgccgcgaggcagaatattgcggaattcgcagaactcgcgcatcgcatcaagcagaccctgacgcagaccattgacgtgcgttccgccctgcatggtcgggatcaggttaacgtagctctcggtcagcatctcgccgccctcaggcaaccacagcagcgcccagtctaccgcttcggtatctccggcaaacgcgccgacgaaagccttttcaggcagcgtgatgaggccgttgaccgactccatcaggtaatcagtcaaaccgtcttcatagcaccagcgctgctcggtgttgttgacctgatctttgaaaatgatttcaacgcccggacaaagaaccgccttggccttcagcaaatggctgagtcggctgacggaaaaacgcggactgtcgaagaagctggcgtctggccagaaatggacgctggtcccgtgttacgcttaccgacggtgccggtaacgctgaggtcctgcaccttgtcgccgttttcaaacgccatggcatagacttgcccgtcgcggcgcacggtcacttccacacgcgtggacagggcgttaactacggagatccctacgccatgcaggccgccggagaactggtagtttttgttcgagaatttaccgcccgcgtgtaggcggcagaagatcagctcaaccgcaggaatgccctcttcctggtgaatatccaccggcatgccgcgtccgtcgtcggtcacttcaagcgactgatcggcgtgcagaatgacctcgatacgacgggcatgaccggccagcgcctcatcgacgctgttatcgataacttcctgccccagatggttgggccgagtcgtatcggtatacatgccaggacggcgacgcacaggttcaaggccgctgagaacctcaatagaatccgcgttataagttgattggctcatcgtttattaattcgtggctctggttgtgagtgaacgatactgttgctggcgaacgagactgcggcaagcaaaacgcccgccgtgagtaatactcaatccgatgccaaccccaagaaatccacaatcggtgagaaataacgttcaaacccgacaaaagtgtgattaccctcgggttctacggtctggcggcacgcggtgtaatacgccacggcctgacggtagtcgagggtttcatcgccggtttgctggagtaaccagagtaaatcgggtgactccaaaggctcgatctgcatcactttgagatcgtaaacatggcgagactctaacacatattgctggccggtgtaggggttctgattgaccccgagatagtcgattaagagttcataaggccgcactgcgggattaaccaccaccgccggcagagtaaagcactgcgacagccaggtagcgtaatagccgccgagagacgagccaacgatgccaatcttctcgcccgatttttccatcaccagcgtttcgagctgctcggcggcgtcggcgggataaggcaaaagctgcgggataatcatttcgatgcgcgggtggttctcggcgagccaggctttcatcgcggtcgccttggcagactgaggagaactatcgaacccgtgcagataaagcaaggtactcattaataaccttccgcgtcggcgtcggggctaaactcgctggtttgcaaacggcaaacctcagtctcgacgcggccatcagggtgtagcgtcagatatcgccaacctggggcgagcgtatccagcgtaaaattggtgcagtgaggtttgaactgcacgcaggtcgacggcgtggcatacaggcgcttgccgtaccagtcgaggtccagctcctgatgaatatgcccacaaagcagcgtcgacacttgcggatacgcttgcagcaccgtcgccagcgtgtgcgcattgcgcagactgtgctgatcaagccaggtacagcccgacggcagcggatgatggtgcagcataatcagggtaaatctgtcgggatactggtccaggcaacgggtcatccagtcgagctgatattcgctcagctcaccgtgcggcacgccgaaaacctgagtgtcgagcagaagaatttgccaatcgttgcccagcaatacctgtttggaagggtggatccctgcttcggccaatgcatccaccatggcaggttggaaatcatgatttccgggcaaccagacacaggggcatgaaatcgattaatgccctctgcaaagtggtgataggcctcgaccgattgatcctgggctaaatccccggtcgccgcgataatatcaacctcacgctgctcggcagaaatggcgtccagcacggcgcgatagctgcgaaacgtgttaacgcccagcaaagtctggtcttcacccgcaaaaagatgagtatctgtaatctgtaatatcctgactttggccccatctaccaaaggcagcttaaacaggctttccaaattcgatcctttgttattcaagtctgtctaacaaaccggaactggcatggctccatgcgccagacaatagcgcaaccaatcagcaagaaactggttaatttgatgcttttcgtcacgctgatgcaactttttattaggataatcatagcgtgctttgaaacgaaagatctgttggctcgcacacacttcagcaaccatggcatcgtgataaaggcggacgctcattgaaggcaggctccaatagctgacggcgggggcggtctgcttgatttcaaccagcgaagtatagcgtgtcgattccagaatttttaactggtaggtcgcgttagttacctgataagtcaccgtctgtcccacttcatcatttcgaggcagcaaacggcgcagctgtgcaaaattggtctcgcacagtcgcatcatttcaggaaaatcgggaacatagcgcttgatcattattcaacccattctttttttaaggattcatggtgcagagccagccattgcagggcaatcactgacgcagcattgtctatcgctccttcttccacccagcggcaagcctgctcccggctgaccacgtgtacccggatgtcttcattttcagtttccagaccatgaattccctctgccgtcgtcgcatcaacttcgccgaccataatagaaaggcgctcactggtaccgcctggacttgccagatagctgagtaccggtttacagcgtttaaccactacgccagcttcttccaatgcttcgcggcgggcgacgtcttctaccgtttcgccctcttctataatacctgcgaccatctcgagtaaccatggggtctcgctggatcccagtgcaggtatacgaatttgttcaatcaccaccacttcatcgcgtatgggatcataaggtagcagaacggcagcatggccacgttcaaaaacttctcgcaccacctctccgctcatttcaccattaaacaggcgatggcgaaaccgataggcgttaatggagaaaaaaccttggtaacggttttctatcgcaataatttctaaatcatttctgccgaaaactactggcgaatctttgaatttgtccattacgatgctaccccgtccacggttaaaattaaattatctccatttcaggcatttttgatgaagatgcggtaataataatcaagattttttgtgttagatttggatacaagcggctgagatggcacattacgtcatgcaaattgcctaaaaatctctgctagaatccgcgtctgttagttttaatgacagcattaaataataacattgctgcactacaaggaatgcaaatgaagaaactgctacctcttctcgtcgctctgggtctcggcggctttagcacgatgggccaggctgaaaatctcatgcaggtatacaggcaagctaaggaaagtaacccggatttgcgtgcggctgctgcaacccgtgatgccgcatttgagaaaattaatgaagcacgcagcccgttgctgccgcagttgggattaggcctcgattacgactatgccaacggttatcgtgatgcaaacggcgtaaacagtaagatcgccagtggcgcattgcagttgacgcaaactatttttgatatgtctaaatggcgctctctgacgctgcaggaaaaaacggccggtattgccgatgtcacctatcagactgcgcagcagactcttattctgaacaccgctactgcgtatttcaacgttttgagtgcgattgatgccctcatttataccgaagcgcagaaacaggcggtttaccgagagctggaccaaaccacacagcgattcaatgtaggcctggtggccatcaccgacgtgcagaacgctcgttcaagttatgacaccgtgctggcgaacgaagtcaccgcgcgcaataacctggataactaccttgaggtcctgcgccaatataccggtgtttactacccgcagctggcatcgctaaatatcgcaacctttaacacccagcgtcctgagccggtcaacaatctgctcaaagaagctgataaccgcaacctgagcctgctgtcagcccgactgtcgcaggatttggcacgtgaagaaattcgctattacgaagcaggccacttgccgacgctggatcttaccgcctcaacgggactgaccaatactaaatacaacggctcaagaaccggcccggcgtatggttatgatgactctaacgccggtgaaaacaaggttggcctgagcctgactattcctatttacagcggcggctcagtgacttcgcaggttaaacaggcacagctcagcttcgttaactacagcgagcaacttgagagcgcgcaccgcagcgtcgtgcagaccgtccgttcatcgtttaacaatatttcagcctccatcagcagtatcaacgcctataagcaggcggtggtatccgcccaaagttctctggacgcgatggaagcaggctacaaggtaggcacgcgcactatcgttgacgtgctcgacgcgacgaccacgctgtataacgctaaacaggagctctcgagcgcccgttatacctatcttattaaccagttaaacgtgaagtcagctttgggtacgctcaatgaaaacgacctgttggcgctcaacggcgtgctgggacagccggtgccaaccagtcctgagcaggttgcgcctgaaacaccgcagcaaaatgcggcggcagatggtttaaacactagcacaatgccagcccctgcaccgattaaacgcgccagcgtgtcagcgacgccaagggcagtgaaggccagcggtaatcctttccaaaactaggtagatgtttctgaaaacacgctaaagcttttctacaaccgcctccagaggcggttttctttctcatccagcccataatccgcaccacccccccttttctggtcagatttcacgtctgaacgtaaagtctcgtaacgttggccgttcctgctttaatagtaagcatctttaccttattcttattctgttacaaatgtaactcactctgggtaagggcaaataaaagcccgacaatgggatctatacaatgaaacggacacaaaatattaatcttgctaccttccggaaatcctggcgtagctcgcgaattaccccggccgctatagctatcagcgccgtatttatgctcagcgcctgtgaaaaaagtgatgaaaacgtgtcgctttatcagaacgccgacgactgttcaaaggcaaacccttccagcagtgcgcaatgtgccaaagcctttaccgaagccaaagccgaagcggctaaaaccgcgccaaaatacgccaatcgtgccgactgtgtggccgaatttggtgagtctcaatgtacgcaggctccagcgcaggccggcatgtctgccgagtctcagcaaggtggcagcatgtggatgccgctgatggcaggctttatgatgggcagaatgatgggcggcggcggatatgcacagcagccgttgtttacctccaagaacgcaggcagcccggctaacggcaagtttgtcgatgcgagcggtaagagctatggtccggcaacgaccggccgcagcatgaacgtgccgccatcggcgatggcaccaaaaccggcgaccaccagcacagtgacccgcggggcttcggcgagagcgtggcgaaacaaacctcgatgcagcgcagtgcggcctcgagtacgcgtactccaatgcgcagtatgggtggctaataatgaaacgcgtagccctgcaagagcgacctaactggcgcgaaaaagccaccgagttcggctttaacttccacacaatgtacggcgagccgtactggtgtgaagacgcctactatcaattcacgctggcgcagattgaacagctggaagatgctacggcggaactgcaccaaatgtgcctgaaggtcgtggatcgcgtggtgaacagcgacgcgctgatggccagattccagatccccaaacacgtctgggagtttgtcagggcctcgtggcgcacgcagcaaccttcgctctattcacgcatggacctggtgtatgacggcgtaaatccacccaagctgctggagaacaacgccgatacgccgacctcgctctatgaggccgcatttttccagtggctgtggcttgaagatcaaattgctgcaggcggtttgcctcagcaggcggatcagtacaacagtctgcaagaaaaactgatcgagcgattttctgaactgaagaatcagcacggcttttcactgctgcattttgcctgctgtcaggacacggaagaggatcgcggcaccgtacagtatctgcaggactgcgcgcaggaagccggactcgcgaacgatttcctctatatagaagagatcggtttaggtgagcgcggtcagtttaccgatccgcaggatcaaatcatcagcaacctgttcaagctatacccgtgggaatttatgttccgcgagactttttccaccaagctggaagacgccggcgttcgctggcttgaaccggcctggaaggcgattatctccaacaaagcgctgctgccactgctgtgggagatgttccctaaccacccgaatctgcttgagtcctactttgccgaagacgcacacccgccgatggacagctatgtcattaagccgctgttttcacgtgaaggtgccaacattcgcatcattgagaacggcaaagagatcgccagtgcggaaggcccgtacggcaaggaaggcatgatcgtgcaggaatattgcccgatgccgcgctttaacgacagctacacgctaatcggcagctggctggtcaacggcgaaccttgcggcatcggcctacgcgaagatcgggcattaatcacccaggatctctcgcgcttttatccgcatgcgattatcggctaacggcgcttagcccagctgcaccgacagcatgctcagggaactcatcaccgttccctgggttggcagtgtgattggctccacgccgtcccaggtgcccagcaggtaaagcagcggcaggtaatgttcgggcgttgggttagacaacgcggcaccttcgtgctgcataaagttaaccagcggatggtccttcgcctcccctttccagccaagattattcaccacgtattcatcaaaagcccttgcccacgggtagggttcggcgtttccttcccatttcaccatacgcaggttatgcaccacgttgccgctggcaacgatcatcacgccctcgtcacgcagtgcagcaagctttttacccagctgataatgatattcagccggtttagtgccgtcgatgctgagctggatcatggggatatcggcctcaggatacatcttgatcagcacgccccaggatccgtgatcgtaaccccattcttgatcggcaatcacgtctagcggtgccagcagcgcctgaacacgttttgccagcgcgggagagcccggtgccggataacgtttatcaaacagcgcctgcggaaagcctccgaaatcgtgaatggtgcgcggattctccatcgccgtcactgcggtaccacgggtgtaccagtgggcagaaacagcaaggatcgccttcggacgcggcaggttttcccccagcgcttcccaggcacgggtatagacgttgtcttcgagcacgttcatcgggctaccgtgtcccaaaaacagtgctggcatgcgtgaggtagtcataaaatgttccttaccgctcggattaagaggtaatggtcaccgcgacggcgaccattcgatagaaagaggttactcttttcctctactcggatcagccggataaccgtgatgatgatgttcaataaatttgaatggttaagttaatgggccggggtatcttctccaagtgatgagaatagtacttgctcctgagtgaattgaatcacccgatcctgattgtcacaggggacatcagccagcatattgcagcccgtgccgatcagcttatccttaatacccgtccactgcgcaaacaggctcaggaaattaatcgcacttctagggtaagaattaacttcccttcttttactgtctgatgaagtcataaacatcggcacggtataattttgttttaatttatcaccgtgctgtaatcgcgcgttatcggtgtccggccccttaaatgctaggccatggtcagcgaaatacatcattgaccaactctgaccgctctctttcgctaattccactaccctggaaagaagttcatccgtttctctaatactttggatatagcaggatatttcctttgattggctgaattcctgatatttccctttcgtcctgtcacaggcaagaggatgcgaacccatcaggtgtaatacaatgagtttcgccggcttattttgtttcatcactgaggcgacaccgcctaaaagatcgaaatcccccgatccaaccccatcagaggatttacctttttgcataaaattaaataaattagctcttttggcgaatgaggcaacagaggtgtcgtgcggaccgagactgccctgattagaataccaaaaggtcgtaaaacccgccttattagccagggtaataatattattattcagctcaacgtagagacctcgccgcagtgataatgaattcttcagcgaagtctgcgttgatgatgctgccgaaatataatgggtaaataataccccggagccgagctcataaaaggcgtattaccgatcggaaaaccataggcattcaggtagtcgctgcgtacgctctcaccgatgattattatgtaattctgatagttagtgagcgttctttctggagcccagacgtctggggtggtcaggctctgctgcattaaggccgtttcctcatccacttggcggtaattctcgagaacatcagtgacaaatcttacaacaggaatacctgtgctaaaaactttcaccctaccctcattgatataaagcctgaccggcgtcgaaactaaggagataaaaaggtaagtgataattatcggcctgaaatttaatttgtcgacctttatgtcgaaaataaaaatcgtcatagcgagagtcacgagtggcaagctaaaatagaacccaggaatggtttttataagcataataccttcccttacattactatatttcaccgaaaggagggtattaaaatcaaccggaccaaaagataatgcaactgggagatagaatgaagaaataataaagattatggcgataagtaatttatataaaaacgatgaaaaacttgagacggtaagcatgattaaaaatagtgtaataacatgcataattttaaatgggtaaccaaaggacaggcatgagatcaggcaaaacagaaataagacaccaaacttaacttttatattcaatgaggaattatttatcaaaatcaaaccaattaagttaataaatgaatgataaaattctactcactggttaaccggcatcctaccgtcctccccttataaaaccttaataccctgtgatcttgttgctgaaaaattaaaaagccgacataaactctgtcggctcttgttaatacatgacctggtaaataaaaagcttagccagcctgctgagtcagagcttcgcgataagccaccagatcgtcgatggtcaccaccggcatattatgattgttggcaaacacaatggcttctggcgcgtgagccatgctgccgtcgtcattggtcagttcgcacagaacgccgtaagggccgaatccagccagactcacgagatcgatggtcgcttcggtatggccacggcgggtcaatacaccgccgtcgcgcgcgcgcagcgggaacacgtgccctggacggttaagatcggaaggttttgcaccctcggcaattgctgcacgaatagtggtcaagcggtctgacgcggaaacaccggtcgtcacccctttagccgcttcgatagtcacggtaaaaccggtctgatagtggctggagttttgctcaaccatcatcggaagctcgagctgcttgcggcgttggtcggttaaacacaggcacacgatgccgctgccatggcgaatagttagcgccatttgctcaacggtcatggtttctgcggcgaagatcatatcgccttcgttttcgcggttttcgtcatccagcaccatcacaccctggccattgcgtagcgcagcgagtgcgcgttcaacgcgttctgacggcgtgccgaattcggaaagtaaagtctgattcatggtaaaataacctcattaactctatgaaaataaatggattaccagaatcagggcgtcttgcggagtcagcatggccatgcgtatagcaggctatcgctataaaataacgtagcgggcatttaagcccgatcaattcgttactctctcccatccggactataaccgtcggccccggaattacaccggatctgctgaccttatgccctccatcaaagatgaagaaacctaagcgctcgcgggcttccacgatgatgaaagagtgtttcatcaatttgttctgtggtttaccgccggtggggacttgcaccccgccctgagaataagcatgccaactataacgccaaaaaaagctgcgggcaatgcacccatcgtgctattgggccgtggagatgaacgattaaaggtgtcgtgaaaggtttatagaatggcaatctggcattacactaagagaacgccacttttctgaaacagggtaacgacaatgatcgacactaaaaaaattgaacaaatagctcgccaggttcatgaagccatgcctaaagggatccgcgagtttggggaagatacagaaaagaaagtgcgtcaggttcttcaggctcagttcagccgcatggacttggttaaccgcgaagagtttgacgtacagacgcaggttctgctgcgcacccgtgaaaaactgacgctgctggaacagcgcctgacccagcttgaaacccaactggcagcgactgccgcccaagcgcagagaagccgcaggaataaccgtcttcttgcaataaaaaggcccgcataagcaggccttttttaatggtcagagcgcgagaagcgaggctctctactcctgagatttaatctgattgattatcttggtagttgataaaccatcttcaaaattcaggactttgacttcaccgccattggcccacacttcgtcgcatccggcaatctgatgaggctcgtagtctccgcccttgaccaacaggtcgggtaacactccggcaatcaggcgacgcggcgtatcttcttcaaagccgaccacccagtcaaccgcacctaatccggccaacacggccatacgctgtgcttgagcattgattgggcgcgtttcgccttttaaacgcttggtcgaggcatcgctgtttaccgccacaatcaggcgatcgcccagcttgcgcgcattggcaaggtaagaaacgtggcccgcgtgcaaaatatcaaagatgccgttggtcatcacaaccttctcgccgcgctgacgcgcatgggcgacggcaactttcagctcttcttcggtcatcacgccaaaaccggtttcggtacgaccatgtaccgcattttcaagctcaacggtagaaacggtggaggttcccaacttaccgactaccacaccggcagcggcgttggcgaggaaacaggcttcctcaaggctgctgcccgcggccagcacggtcgccagcacaccaatcactgtgtcgcctgcaccggttacgtcatacacttcctgcgcctgggttggcaaatgcagcggcgccttgcccggttgcagcaacgtcatgccctgttcggaacgggtcaccaacagtgcagaaagctcaaagttggcgatcaacgccatgcctttctccaccagttgagcctcgtctttacaggcgccgaccaccgcttcaaattcggagaggtttggcgtcaacagcgtcgcaccgcgataacgctcgaagtcggatcctttaggatcgaccagcaccggtacacccgcctttttagccagcgctatcatagactgcacgtcttgcaaggcgcctttagcatagtcagacaacaccaacgcacctgtttctggcaaggcgttctgaattttgtccagaataggctgtaggtcgataccctcgaaaccttcttcgaagtcgagacgaatcaactgctggttacgcgaaagtacgcgcagcttggtaattgtcggatgtgtgggtacggccaggaaatcgcagctgacgttcacttcgctcaaacgctcactcaacgcccgggcggcatcgtcggcaccggtcaggccaatcaggcgagaacaggcgccgagcgaggcaatgttcatcgccacgtttgccgcaccgccaggacgctcttcaatcgtattgactttaacaaccggcaccggcgcttccggcgatatacggctggttgggccataccagtagcggtctagcattacgtcacctacgaccagaacgccggcacggtgaaactcaggcaaagttactttcatcccacactccaaaacagagatacccgcgatttccgggtataaaacttagcaaacaggctatctgaacaaatcgtagccaaaatggtgttgttcgtagcgaaaatcgttttgtcacaccaaaaacaatgcgcgcgataatatcacaagcgaaaaaggttgttggtaaaaccgactcagctcagccagcgctgccagctctcgatcacctgctcgcgctcggtgacaaacatatcgaccgcaactttcccattatgttcctgtaaagccagatgatgtatttcatcacgcagggtcacataggcatgagtcagctgtaccgcctcctcatgcgacataatcttgtacttcgccatcagctcgaaaatacgcacgttatcagaccaacgggtcaggtcaggctcagtgctggcgtagcgcagaaccagatactgagcgataaattcaatgtcggtaatcccgcccggatctgccttgagatcgaaaacgtcaccctttttggttgctaaatgagcgatcatcttttcacgcatctcgcggacttcttttttcaactgctcgccatcgcgcggcttacaaaggatctcgcgacggatgccgttaatctgctgggtcatttcaggactgccgtacaccacgcgggcacggaccagcgcctgatgctcccaggtccaggcgttttcctgctgatattcccggaaagcggtgagggtgctgaccagcatgcccgaggcgccagaaggacgcagacgatcgtcgacctcatacagaatgcccgacgccgtgcgggtgctgaaaaggtgcatgatgcgctgcgccagacgcaggtaaaactgccgtccgtcgatgctgcgtggcccgtcggtcaccacatccattggacaatcgtgcaggaataccaggtccatatctgaactgtagcccagctcccagccgcccagcttgccgtagccaataaccgcaaagccgcgcccttcctgctgctgcagataggtcggctggccatagcgtgacagcatatggtcccatgcctgctggataaccgccgtcagaatcgcctcggccagataggtcagatgatcgctgaccttcatcaccggcagtacaccggcaatatctccggcggcaatgcgcagctgctgggcctgtttgaactgacgcagcgcttcgatttgctgctcttcgtcatccgctggcacgcgcaatagatactggcgcagttcatcggggtaggactccggagcgataggctgatatagcgtgttcgggtcgaggagttcgtcgaggaggatcgggtgtcgtgcaagctgattggccaccatcggggaggcggcacagaggcgaataagctgtttaagcgcaccgggatactccaccagcagctcgatataggtggtccgcgtgacgatattgagcagcagcagggtcaggcgctgcaacaggacgtcggcgtttttgtaagtacacacttgcgccagcattcttggcatcagctggtcgagctggtcacgtccacgtggcccgatggtacgtttgtccacgtcctgacggaaatcgccgatggtgcgcagcagcctggtgcgcgcctgttcactaagaggttcggccagcggcagcaggtcgccgtcatcgagttcatcggtccacaggctgttgaactgctcctgctgtgggtcatcaccggcgtctggcgtgtcgtcgccaatcaggtcatcaaagaccccgcgcaccgccaacatatgctgggtcgtgtgctgatgcagctcgtcccaggtattgaaattcatgccccatgcgaggcgcgcccggttgagatcatcacccggcagggtctgcgtttgttcatcggcaatagcctgtagcaagttctcaagacgacgtaaaaacagataactttcattgagttgacggacctgcgactcgggcagcaggtgcagcgccgcgaccgcctgcagggtcggcagcagcgccctctgctgaagcgagggctcacggccaccgcgtatcagctggaacacctgcacgataaactcaatctcgcggataccgcccgcgccgagcttgatattgtctttcagcccgcgacggcgaacctcacgggcgatcatgcctttcatattacgcagtgactggatcacgctgaaatcgatgtagcgccgaaacacgaacggcttcagcatcttgcgaatttcctgactgctggcgtcttcagcgtcgcccatcagcttggccttgaccatcgcataacgttcccagtctcggccctgctcctgatagtaatcttcgagcgccgagaagctcattaccagcggaccgctgtcaccaaaagggcgaaggcgcatgtcaacgcgatagacgaagccgtcaatagtcggctgatctaacgctttaatcagacgttgacccaaacggataaaaaattgggcgttttcgagctgacgacgtccgccctgtgtctgcccgttttccggataagagaaaatcaggtcgatatcagaggaaaaattaagttcacccccaccgagtttgcccatacctaaaatcagcagtttctgcggctcacccgccgcgtttaccggcgtgccccactcgcggcaacaggtctcgtagagccagtcgcgggcggcgacgatcagcgtctcggccaatacgctcagctgctgtagcgtttgctcgcagctgctagtttgcatcgcctgcgaccagctgatacgcagcattttagccttgcgaaactggcgcagtgccttcatcagccccgcttcgtcctgtaccttagccagctcgtcggcaagctcctgtgcataatattgccactcatccacgcgcggcgggctggcggaaatctcctgccaccactgcggatgcacaataaagttctcactcataaagtcactgctggcaagcacgcgtagcgcaccttcggtgagcggaggcaggtcgtttaattgctgttgttcttggctttgtttaaaacgcaggtgcagcttttcggcctgagccgcgagcagcggggtgagaggcaacattcttgggttcctttcatagtcggcctgacgtggcgtcaggccgggcttaggattagcggggttgtccgtttaaccaaaacgcagtctgcatcaccgcgtgctgacgagccgaatcttcccaggcgtgctgttgctgcacgatagcctgctgaagttcagtccagacattaatataagccattgattcctctagaggataagctccgctcagaaggtggaaggcgatcacctggcgcttcaggcgcgcgagctggtcgcggaatccctcttcggtcagcgactgggcgaaagcctctttcaagtctgccgcagtgcggccaagcatgatatcggcgaatcgcttgaaggagccgtcgagcttcttctgcgacttatcgtcgacgaatggcttccaggcctggtttgccaaccatgaagtgagtgctaacttacattgcagatagtctgcactgaggcaggtttcctgcgcgtccagccctttcttctcgagcttttccgccaatgcagtcagcgcagcgcgcagctcggtagaggctttgcgtggaatgagtccgccgtaaatcaccagcgtctggcgcacggcctcaacgccttgcaaaacgctgatacgcgcggttttgtcgccacgcacccacagctcttcgtgatactgccagtggcttaacgccagctcaagcatgccgctaagagcttgttctacggtcgctttaggggccgcgtggaaaacaggcagcgcacgcgcttctcgcaccacgttgccctgtgccagatgataaccgcgtgccgccttactcaggccgccgagacgcagtccaccgtttttacccagcagtgccgccagcgccagtaaatcaccggtattgccctttttgatctcgagttcgatttcagaaagcgactctgactgctcacccgccgtcacgtgaccttggtcgaggccaagctcaatctcgctttgctggtaagtgatcacccacttctcacgcacaaaatcagtacggaacagtggcttcagctcggcctgtagcgcggtgacgtcgaaaccctctggccagatatcagccgggaacaggctcaggtccagctcaggcttcttgatactgacattgtattcaggacgctggtgcagccccgccaccacttttccggcggtcttgatagtcatctcgtagctgtcgtcaaaaccgcgaatacgcagccccatatccagcttacgcaggcggttatccgccgtttcataataaatattggtgagcttctgtggcgcagagtgctcacaggtaaacgcagccaactgctcaggaagctcggcaattgccgcaggagtggcaataaattttaattctatttctaaggtcataagtctttgcaccgcttcttcgctgataaagcattttagtttaaaaaagtttaggcaattctatcatacacgcccgccgggagccgcatctcgtgggattgtaagatagttctcatttaggtttatgcattgcgtcgtcacactgttgcccttactatcgttcatcacaaattttatcgacagatggggcactgattcacaggcccgccaactacgaagaatgacgaataatgaataaattacgcctttttggtttcgctttgctcactttaggcatcacttggggcgctcacgccgatgagaagcgctacatttccgacgatttgattacctatattcacagcggcccaggcaatcagtttcgcattgtcggtgcgctgaattctggtgatgaagtcaccttaaagagcgtcaactctgccaccaactatggccaaatcgttgacgctaaaggccgcgatgcttggatcccactcgaccagttgagcacatcgccaagtctgcgcacccaggtacccgaccttcagcagcaggtgaaaaccctgactgacaagctgagcaatattgataatagctggaaccagcgcaccgccgagatgcagcaaaaagttgcctcgagcgatagcattatcaacggtctgaagaaagaaaatcaggatctgaaaaaccagctgatcgtggcgcagaagaaagtcagcgcggtgaacgtccagctggatgacaagcagagaaccattattcttcaatggtttatgtacggcggtggcgtggcaggcattggcctgatcctcggtctgctgttgcctcacctggttccacgtcgcaagaagaaagatcgctggatgagctgagtttcttaactccgcactataaagctgatttcagaaaaggcacttcacgtgccttttcgtgttgctgccagtcagccatttcacgccaaatccagcattgttgacagactgataggcagaaatcgcgttaacaaatttgctacaataagggcttaatccctttttggtttgtttatcttcatcaggagttatctcgtggaaatctatctggtcggcggtgccgtccgcgacagtctgttaaatctcgccgttagtgagcacgattgggtcgtggtcggttccacgcccgaggcaatgctcgaacttggctatcaacaggttggcaaagattttccggtattcctccatcctgtcagccgcgacgaatatgcccttgcccgcaccgaacgcaagtctggcgctgggtataatggctttacctgctatgcctcgccggacgtcacgctcgagcaggacctgatgcgccgtgatttaaccatcaatgccatcgcacgcagcgccgaaggtgagctggtcgacccctatcatgggcaggccgacattgaagcgcgcgtgctgcgtcacgtttccgatgccttcggtgaagaccccttacgcgttctgcgtttggcgcgctttgccgctcgctttgctcatctgggctttactattgcgccagaaactcagcgtttgattacagaaatggccgccagcggtgaacttgaggctctgaccccggaaagagtttggaaagaaaccgagaaggcgctgcaaacgcaagatcctcaggtttatttccaggtgttacgtgattgcaacgccctcaaagttctgttcccggaaatcgatgcgctatttggtgtgccagcgcccgccaaatggcatccagaaatagacaccggcatacacaccctgatgacgttaaagctggccgcagaactcagcccagctgtcgatatccgcttctcggcgctatgccacgatctgggtaaaggcttaacgccaaaagaacattggccaagccatcacggccatggtccagcgggcgtgaaactggtcgaaggactgtgccagcggctgcgcgtgccgaccgctattcgcgatttggcggtgctggtcgcggaattccacgatctcatccataccgttgaaagactgcgtcccgagacgttgctcaagttgttcgataccatagacgtctggcgtaaacctcagcgcctcgaacagatgatactgaccagtgaggccgatgcccgtggcagaactggctttgagcgtaatccctatccgcagggcgattatgtgcgcgccgcgtttgccgctgctaacagcgtatcgatcaaagaggttgtggagtcaggtttgcagggtatggccattcgtgaagaactcagcaaacgtcgcgttgccgcgattgctgaatggcgggagcatcaggaaatcctggcccgctaaatatcgacttatcgtcatcagaaaacaaaaaacccgccgaggcgggttttttaatgctttctcactctatcaggtcaggaatacccaatagaccagcgccgcgaccacgaaacgataaatggcgaacggcacaaacgaaatacgtttgatcaatgccaggaaggttttaatcgcaatcagcgccacgataaacgcggtaacgaagccgacggcaaacatcggtaagtcagaccagctcagaatcgagtgattcttatagagatcgagcgcgctggcgcccaacatcatcggaaccgcaagcaggaaggaatattcagaggcggcatagcggctcacgcccatcagcagcccaccgccgatagttgcgcctgaacgtgagaatcccggccacagcgcaagacactggaaacaaccaatcaggaatgcctgaaggtaagtaatatcatcaacgccgaccgctttcgggaatttcggctttacccattcagcgatgagaatatagataccccgaccaccagcgcatacatgacatatttaggctcgaaaagcgccttaatatcatggctaaacaccaggccaattacgactgccggaagcatacccagaataatatgcagcagggtaagatgacccttacctattccttcatgctcgaccttcttaccaaaatgaatgccaatcagcccaaacagacgacgccagaacatcacgacaacggcaagaatagaccctagctggatgataacttcaaaaactttagatttatcatcggtgtaacccatcaggttaccggcgataatcaaatgtccggttgacgatacaggtaagaattcagtcaagccctcgacgatacctaaaatcagcgcaattaatagctgatggccttcagttaccataatattccctgccccagagagagattcatttaaaacgcaaaatgcgtagcgcttaagacaaaattaagaatttgcctagttttaccctaaatacaacatctgaacgtggtcattagtaatgctttattatgacagcagtttttcaacttatacttttaaaaggataatttaaacgaaaatttatttactgcgcgttccacgctcaataatcacgccgacattcgccgcatgagcaatggcgccaggcttacttaatttaattttgacccacggggtattgaagcgcgccatcagcaggcttgcgacctcttcggccactctctcgaccagtgcaaagctgtgggaagtgacatgttggataaccacgtcgctgacgtctgcatagcttagacagtcattcacgtcatcgctcttggcggactttcggttgtcccaggcaagttcgatatcgaacaccagcttctgctgaatggtttgttcccagtcaaaagcgccgattgtggtgattacattaagttgttctataaatacgatatccatcacgcgtttctccgttttaggccttgccggagttgcccgatcaattccaaaatgcagtgagagagcttacttacctgcggcttgaaggatgatgggtataccacttccagcggaaaatgcgtattatccatggatgttgtgattaaaacgacccctaatagacggaattgcttttatgagtgcaaccgcgcttggaatgattattttcgcctacctttgcggctcgatttccagtgctattctggtctgccgcctggcgagattacccgatccccgaacccaaggctccggcaatccgggcgctactaacgtcctgagagtgggggtaaagcagcggcagccaccgtgctggtcttcgacattttgaagggcatgttgccggtgtggttggcctataagctcaacgtgaccccgatgtatcttggcctaacggcaatcgcggcctgcgttggtcatatttatcccgtctttttccgcttcaagggcggtaaaggtgtggcgaccgcgttaggcgccattgcccccatcggctgggacctgaccggactgatgaccggcacctggctgttaacggtgctgctgagcggctactcctcgctcggcgcgattattagtgcgctgattgcccctttttatgtctggtggttcaaaccacagtttaccttccccgtcgccatgctttcgtgcctgatactgcttcgccatcatgacaatattcaacgtctgtggcgcggtcaggaaaccaaaatctggacgcggctgaaagagaagaaagcggccagaaaagccgccgaagaagcgaaaagtaacaaatagccgacataaaaaaacgacctcaagggtcgttttttagtttccggcgcgtcatacaaagcttgcgttagacattgagagacaagtcgcctgacgccggtccctgtttcgaagcaagtcagcaataccctggtcactcgccttacacaggcgcgagttcatccagaggccatcgagggcgtacagaaatactcaaatctgtattcgcgctggttttcaaccgcaccatgcccgcataggcaatcatcgcgccgttatcggtacagaattcagggcgcgcataaaacacttctccaccgcgtttttccatgacctcagccagtttgctgcgcagcgtgcggtttgcacttacgccacccgccatcaccagacgcttgaagccggtctgctctaacgctcttttacacttgatagccagggtatcgaccaccgcatcttcgaaggcgcgggcgatatcggcgtgagtctgggcatcgttttcattaccgcgaatcgtgttggcagcaaaggttttcagccccgagaagctgaaatcgagccctgggcgatcggtcatcggacgcgggaacgtgaagcgtccggccacgccctgctgggccattttcgacagcaatggaccaccggggtaatccagacccagcagttttgctgttttatcaaaggcctcacccgctgcgtcgtcaattgactcaccgagcagagtgtattcgccaatgccggtaacgctaatgagctgggtgtgaccaccagaaaccagcagcgccacaaaggggaattcaggcgggttatcttcgagcataggggctaaaagatgcccttccatatggtgaacggggatagcgggaacgttccaggcaaacgccagagagcgcccgatagtggcaccgaccagcagcgcgccaaccagtcccggaccggccgtataggccacaccgtcgatatcggcagcgctaaggttagcctctttcagcgcttccttgatcaggggcaacgtcttgcgcacgtggtcgcgtgaggccaattctggcaccacaccaccgtagtcagcgtgcagttttacctgactatacagttgattagccaataacccgttttcggtgtcgtaaattgcaatgccggtttcatcgcaggacgtttcaatacccagtactcgcatcactctttccatcatgttttcgcgctatctcgcggcgcgtagtctagcacataacccgccgacggtattacatcgtcgacgtcagaacgcgcgttttatgcgcacaatcgccagctttttgcacaaatcaatgattaatgtcgagcaattcaaattgattggtatataatcggcggccgacgcaaaagcgagcgcacagtccatcgataaatggattgtaatgcgcctgtttcaatttgccattgggctttacaaggctaggcaagttggagtaaaattccgcaccattttgaaatgagctggcacaacgctagcgaacaaaccgattttatcgaggtgagaggcacatgcctgtaattaaagtacgtgaaaacgagccgttcgacgtagctctgcgtcgcttcaagcgttcctgcgaaaaagcaggtgttttggctgaagttcgtcgtcgtgaattctatgaaaaaccgactaccgaacgtaaacgcgctaaagcatctgcagtaaaacgccacgccaagaaactggctcgcgaaaacgcacgtcgcactcgtctgtattaattcttcgggggcaaccccacccgcgtgatactgttttttaaaacgcgcagaccgagtagttgcatacgaaggccgtgctttccgaaaggaatgcgcggcttgttctcgtttataggctacacccaataaatttcgtgatgcggcaagcgcagcagcgcgactgattaaagggtaagtgagtaagggcttatggctgggagaattccgcgcgtttttatcaatgacttgctggctcgtaccgatattgtcgatctcatcgatgctcgggtaaagctcaagaaacaaggcaagaattatcacgcgtgctgcccatttcaccatgagaaaacaccctcattcaccgtaaacggcgataagcagttttatcattgtttcggctgtggagcacacggcaacgccgtcgacttcctgatgaactacgacagactcgagtttgttgagtgcatcgaggaactggcgaccatgcaaggtctggaagtgccgtatgaagttggcaccggcccgactccgatggaacgtcatcagcgtcaaagtctttaccagttgatggagccgctcagcgccttctatcagcagtcacttaagcagcctgccggggcacctgcccgcgactatctggctcaacgcggtttaagcgatgaggttatcaatcattttgccatcggtttcgcccctgcgggttgggacaacgcgctaaagcgctttggtaaaacggccgacgacagaagctctctgaccgacgctggcatgttgattaccaacgaacaaggacgcagttatgaccggtttcgcgaacgtgtcatgtttcctatccgcgataagcgcggccgggtcattgcgtttggtggacgagtgctgggtgacgcattacccaaatacctcaactcaccggaaaccgagattttccataaaggccgccagttgtatggcctttatgaagcacagttgaatcaccctactcctgcccgacttctggtggttgaggggtatatggacgtcgtcgcgctggcgcagtttggcatcgattatgccgttgcgtcgctgggcacctccaccacggcagaacacattcaactgttgttccgcgcaaccgacacggtgatttgctgttacgacggcgaccgtgcggggcgtgaagcagcatggcgtgcgctggaaacggccctgccctatttgcaggatggccgtcagctgcgctttatgtttttacccgacggcgaagacccggatacgctggtgcgtaaagagggcaagcaggcgttcgaacaacgtatggaagaggcgcattcgatttcgaccttcctgttcgacacgttaatgccgcaggtcgacctgagcagtcctgaagggcgcaccaagctgagcatgctcgcgctgccgctgataagtcaggtgccaggcgagacgctgcggctgtacttgcgtcagcagttggggaacaaactcgggattttagatgatagccagctggaaaaactgatgccgaaaccggcggagagtgcaaatagctaccaggcgccccagctaaaacgcacaaccatgcgtatactgatagggttactggtacaaaatccacaactggctacacttataccctcgttgcaaggtttagagcaatcaaaacttccaggtcttgatttgctgaaagaactggccgacatctgcaacgcacagccaggcctgaaaacaggccagttgctggagatgtaccgcgataataaattcggcccacagcttgaaatcctggcaatgtgggacgatatagcagatagggacattgcagaaaaaacattcctggacgcgttggaccatttgttcgattcagcactggtacaaaggctagaaacattgattgcccgctcacgaactgaaggcttgagtgccgaagagcgggaagaagtcagagccattaccgaagcgcgcagaaagcgttaaaacgcttaataacagaatttacgcaaagtagtgaagccaaaacttcagatactcagcgtcacgcaaagccattgaagttacagcaaggcggtaagctgaattaatcgccagttacgtacactaagtaattgactggtgtgaatgaacgtagccaacagcgctgtagcttcatggacaaagcgttaaagaactcacggcttaagtgccgatatatagcgggatgctaccccgcaaaatgccgccatagtgggccgcggcgaaatcaaatacgccccaaatgttatagttggcggtttcgccgaccgacaccaacccaatactctgaagtgtggataccgtcttatggagcaaaacccgcagtcacagcttaagctacttgtcacccgtggtaaggagcaaggctatttgacctttgctgaggtcaatgaccatctgccggaagatatcgtcgactccgaccagatcgaagacatcatccagatgatcaacgacatgggtatacaggtacttgaagaagcgcctgatgccgatgacttgatgctggccgaaaatagacctgataccgacgaagatgcagcagaagcagcagcgcaggtgctctcaagcgtagaatctgaaatcggccgtaccaccgaccctgtgcgtatgtacatgcgcgagatgggtaccgtagaacttctgacccgtgaaggcgaaatcgatatcgctaaacgtatcgaagacggtatcaaccaggttcagtgttcggttgctgaataccctgaagctatcacctatttgttagagcaatatgaccgtgttgaagcgggcgaagcacgcctgtccgatctgatcaccggtttcgttgaccctaacgcagaagaagaagttgcaccgaccgcgacgcacgttggttctgaactttctaatgaagaattagacgactcggacgacgatgaagacgaagacgacgatgctgaagacgacaacagcatcgaccctgaactggcgcgccagaagttcaccgaactgcgtgaacaacatgaagcgacccgccaggttatcaagaaaaacggccgcagccacaagagctctgctgaagagatcctgaagctgtccgaagtcttcaaacagttccgtctggtgccaaaacagttcgacttcctggtaaacagcatgcgttccatgatggatcgcgtccgtgctcaggaacgtttgatcatgaagctgtgcgttgaacagtgcaaaatgccgaagaaaaacttcgtcaacctgtttgccggcaacgaaaccaaccaaacctggttcgatgctgcactggcaatggctaagccatggtctgaaaaactgaaagaagtgaccgaagacgttcagcgtgggctgcaaaagctgcgtcagatcgaagaagaaaccggtctgaccatcgagcaggtcaaagacattaaccgtcgcatgtcgatcggtgaagctaaagcgcgtcgcgccaagaaagagatggttgaagcgaacttgcgtctggttatttctatcgccaagaaatacaccaaccgcggtctgcagttcctcgacctgattcaggaaggtaacatcggcctgatgaaagccgttgataagtttgaatatcgccgtggttataagttctcgacttatgcgacctggtggattcgtcaggctatcacccgctccatcgccgaccaggcacgtaccatccgtatcccggtgcatatgattgagacgattaacaagctcaaccgtatttcccgtcagatgctgcaagagatgggccgtgagccaacgcctgaagagctggccgaacgtatgctgatgccggaagacaagatccgcaaagtgctgaaaatcgccaaagagcctatttccatggaaacgccaatcggcgacgatgaagattcgcatctgggtgacttcattgaggataccaccctcgagctgccgctggattctgcaacctccgagagcctgcgttctgcaacgcacgacgtgcttgcaggcctgaccgcgcgtgaagcgaaagttctgcgtatgcgtttcggtatcgatatgaacactgaccacacgctggaagaagtgggcaaacagttcgacgttacccgtgagcgtattcgtcagatcgaagccaaagcgttgcgtaagctgcgtcacccgagccgctctgaagtacttcgtagcttcctcgacgattaatcaataatcgttagttgaaagcaaaagccccgtctggataatccgacggggcttttttattgcctacaaatgcttgcaggagacgcagagcgctattttatggtatcggacaactgttgatagctttgaacgagttcgtccagcgtcgcgcgattgaggccgcttgggttgggtaacacccagacttcagtatcgcccaacgttatttcctgacgcccccacgcgaccttgcggatgccaaatgcgctgctgaatgcctgcttgccgagcactgccagcgccctcggctggtactccatcatcttggcttttaacgcctcaccgccgtcgcgcagttcattgcgcgccaactcggtagcctctacggtcggcctttcaaccagcatcgtgataccgcaaccggtatccagcagatgctgctcctcttccggtttcaacaaacgttctgtaaatcccgcctggtgaatcactttccagaaacggttatttgaattggcaaagtgatagccgtgatgggcggtagacaggcccgggttgataccacagaaaacgacgcgcagattatggtcgataatgtcggtgatcatgcttgctccttcagcctattttaatcttgctatcctaaaaactcgcagcaataacaacaagctaaaagttgcacataaaacaagcatacagtcggatgaagtgtagacctggagtagttaactaccgtataatcctgcaccgcggccccttagctcagttggttagagcacgcgactcataatcgcttggtcactggttcaagtccagtaggggccaccaaatttatcaaggacttacgctaaaaacgtgagtcctttagtttttcggggatatgccagggatattttacaccggtaatcatggtgttttttggtgatttcatgcccgtcagtatgctccagctttaggctaatcggcgtaacctggtagccattatgttactcctagcgccggtcaaaattacctgtaccgggagctgcgcctctctgatactacaaataatgtcacaacttggtgaccttagcatttctatacagccgctatcctcctttaccgatacatgtgctatcgagctttactggccacaggtcactcagaacgtggtgcttgtttgcaggatctcagtaactccacctatgtgatcaatcgatgtgtgacatcaccaacaaacgcggccaactattccttatccagtgcctttaatagcgattcctattcgcacatgaaaatctgattatgcgtaatcaacttttcaagcgacaggagcggcacaatgaagaatatggaaaaattaaaggatgaggttatggcgtgggcttttgagaaaggccaggagtatgtagcaattgaaattagccggatatggttagggagcaatactcactcaaagagtattcgcctgtaccctatggaagacgaatctggccatgccaatccactagctatacacaataataaacagcaaatatttcgttggatacgcggtgacacaaaagtctcgcaggcaaaggttttagaactggcagatgcaatgttcacctcgctacctgcagagcgtaaagcacgcataaatggggaaactcttaactgccagatatcagtacttctgcacgccatttctaaaacagtcacagcggcgctgctaaaagatgatgaactggaaaagcatattagaaatgcccaccgctcgctcgtcttactgcgcaccgtaagcgcccagcagaaaaaacgttgttctgacatctggcaggctggtggccagcaaaaattattgagaaaagaatatccaaaatgaaatttttaactttagaagaatggtgtaaaaaaacgtattccagcaatcatccgacactacagaccttacagcgttgggctagaggaggttatatctaccctgcaccagaaaaacacggtcgagcataccgagttagggaagatgccatttatattaatccgcggactttcagtctaaaaaatcacaatgttcgagtgaatccacttattgaaaataatcataagtgaaactgcaaagttaaaaagacagaaatattaatgatacacaaatgccccatatacatctgtatatggggctaggatgtgacattaacgcttaggtacacacttttaattgtcctcatccggctcctgcggtggcaagggccagccgtctgactgcaggaaggtgattacatcagagtacttatcggtacggcgctgatgaaggatgtgttggtaaaaattattccgagcaccggtagtaggtagatccgcgggcgtggtatttctgagcattccgagaagaagagtatccgtctcggcagcatcccaattttgcccgttgccaatgatggcatctaggagttgatctagttgttgctggctgaggcggccagcgaatggcgttatgagagcattaaagtttgcctctgaccctcgaaaactcccagatgtttgataatattcgattgccattggccacaagtcagcaagcggctgaaaggcgatcgcgtcgactaactgcttttcagtgaggccagcgattagctccaatagcgcgggccgaaactgcagaaatgtcacgcccgttagaacacggtagtcaatgatctccgcagggggacattttcaatagtcgtttgtaaggatgttcgcgtaggttcctgaaggcgctcccagagatccggaaatgctgcaataaagccgatcgcacgatgtcgattgtgcggctcaagatggtcaatcagtttgacaattgccatagagacgtcaggccaagcatgaccggcgcgatcgcgtatcgcgacgagtgagacaataatcttgtgatggagcgcttcccattgcactggcacacccttgagaagcgattttgcgagaaccgtgccgaagttgcgaacattctgagctcggacgcgcgcgaggtagcgttgctcgacatagtcgaggattcgttgatggtctgtggggaaccctggcgactggacatcgacgtcatacaggtcgaagattgctttaccctgcagaggttcttgcgatagaacgagttccaccgcattgactaaatgaagtcgcaccaattcatgagacggttcgaatagatcgacctcggctgagaacgccgggtgtgcacatagatgcctatcttcgtgaaggcggtctagatgagtccgagcgatgtggttgatgacctgagtattggccgttgcgtcttcaaggatgcttctttctagctgaagaagtttagaaatatccctggaggcagtcgcgttatcccacgactgaagaaacgcagttgcggcagcatcgcccattgcactgagctcacggtacttggcaatcagatcgtagacaagtgcgacccaagcggtagtaagtgcgccacgcaatgctcccgctttgtaggatttcacagcgtcaagaaagtacaccttcgactggggatgccgaattcgggtgagaagtatgtcgagatctatgaatccaatgtccatgattttaaattcaaaggtgtatggtgccgcaaataatatcacatcacagcagaaacaatatcggcaacgcaactttcctctgaagtgccaaacaccagcttagtggctatatttgtcgtatcacttgaggtagtgagccctgtcagcacgtctcactctcaaaatctgattacgcttaataaaaatttgcacatgcgtcgcatagtacgcgttttgtatcggtttcgtatttcctagcatgtcacttgggcaatcaaagaaatagcttcaacgcatgctagacgagggttccagcaataactctcagtgtacgactttggatctaggttgacacttttcgatgaaccttagcaattcttgcatttttaacgctgaaagtgtgaagtctgacgcccggtaaccccttacggtttacactttttgggtgattgatgcgagaagtgtcaagttgtcgcgtttcgtatttcctccagcttgacacttttctacctggctatgattaaccctttgcccattcagacagtgcgctcaagccttccaggctccagtcatcaagatcgtccggacattctgcgaccgtatagcaaacatcacgcctgagtagctctatcgccagttcagcattttcacgtaggccatatcgccggcagtaatgctcaatatccccgctatccaaataaatccctccgtcttcaagaaaatctacttcccagcctagttcccccgcagcttccctcacacgctgctgaatttcatcgtcgttcgctgttggaggcctttgcccgtctttggccttgaccgccttccaaaagtcgccccaggtcatttcaagcgttctattttcccatttaccctgagtcgctataacagacttatcatcctgtcgctttccctctgtggccacagcatcaattttagtgccgcacatcacaacttcgccctttgctatccagtcataaaccgtctgacggcttaccccacagtgtttggcgtaggctgctttactcatcagcatggtgtatttcctctacttttcatacgttgtcttgtattgccaaagaaatagtctctaccaatcaaaaccgctcaagtttgaattacacacagcacggtttaaaacacgaggcgggtgctcacgtgtcagcaattctaaagtggtaagcccacccgcggctatgagtcgatattgcttgtctgtatcggtaagggacttaggtaacagggtgagcgtcgcctggttgtaactgcgggtatggtcttggaaaaccacattgacgacattttgcagatcgccatttatcgtggttcgataatggtcagggttgacgatgaaaggcccacactggaaagcatgagcagatagcgaggctaagccaataagtgccgcgagtacctttctcatgcctccaactcctttaaaatgttagctccttggttcatagaggggaacatgcctaaaagacttcggattttattaaagggaatgtaattaaaattttctgtcaatttagccagtgcgataatctcccaccagtaccgcttaaccagttccagtgataatgaataagctcggtcatgcagcgcctggcattcatcttctgtagcgccagattgtcggtgttcatccaaaagcttttgaatatcggcgacatcaccccggccactcttctcaagtaaaaccctaggatcctcctcgctatagagatgttcagccataacgccagcaaagaggattgtcatccctacaagaatatatgttcgcgcactgtaggtatcatgaaagcagacagcgcggcaatcatctgaaattttaccgttgctgccttttgcaatacgaaattcatcagctagagagatttcaatattaacagcgccatttagccaggccgcaaccgcatgccccgcctcatgaacagccatactgcgctcccataacggttctctgctgaactctataatcatgccctcactcatcatttcatgccctccagtgccttatccatcaactcgcgggcaatgacgtgaattgatggcgccacaccgagctgtgaatgagcgcgctcctgctcctgaatctcccgaatggcgtcgatctggtgcttactgagtaatatcggttttactgttgattgccgcattttgttaacctcatgtttttatatacagtggtcattgtagttgcaaatatcgcaacaaagatgatcattattgcgaaaaaagggataaatgattttatggtgaggatcgaatttgctaattgtcagtgaggggctacgccatatattaaagactccgctttagataatgatgagcgttttaaagggataacaaatggcttattccatacatggccaaaacaagtcgcttctgcctataaataagatatgggcattttatgaggggggttctacatgtaacgttcaaactaccacgcggcgatgaccagcagcatgaatactgctgtcaaaatgataccgagcatccggcgtctcggtctcgtatataacgctaagcagcttcaaataactttaacagcactgttcatttatcaggatatgtctagggaataattctgtatatcttcagggtattgtaagaaaccttggcttggatatggaaaatatagagatagcaaccctcttacccggagctacgttgtttagtgatagcaacataaaccagacatggaaagcccatgtcagaacagcaacgaatacggttgtagtgtttgcaaagataattgatctcagggaaatttgtgtggaagcattctgcgctattcttggtagagggcttggaatcccaatccctaaacccctcctcgttctcgcaaataacgctacgttggatgttattccatcggggcagcatgcactgatgtagggttctgtagatgcggactatcctagttttaggaggtacgccaactgtagtcaagcatacgaaaaactacaaaattttaaagcatcactggatgttggcgttttcgatgaatggattgccaatcatgacagaaatattggtcaccttacttagctaaacaattttatgaaaagttattttctatcaacaagttaaactaaaaaaaaataaatttataagacttctcccattgcttatacatgcaacgcaaagccaatttccctgttttcaatggattttgatgacggaaaaattataatcgaagctgcaaaaactttaatgtgtcgcctgattcattattaacgttacgcttcatccttgttacagacgattggcttcgtcaggggagattatttgtttctcagggtgagctgtggagagaacatgtcatttactttcagcaacttgaaatttcatagaattattttacataacgtttataaacctaatgatgaaggccgtgtagatcccgtcattagtacagtgcttactgaacttggtgaattgggctcccagaaacttgaagaaaggattactaaagttttgggtaacggctctcatagcctacagatggacattgcttctgatggcgaagttagctgcttcagaagcgttgtaaccttgcttgacgatgaaactcctgactttatcacccattcagcattgattgctgaacttcacacccaagcccataccagtaagagctggcctggagggactttagtggtgatttctgggacagctggagtgagcaataagcgatgcctcttcatcattaaggctgaacagcaagcaggattttcagaaaaggttaatcaaggccaagtattaattgaatatttggataacttaatcctcacgcctcagtcacgcctctacaaagtaggtgcatttattgaagttactcgggttgcagttcctgtcgaagaacgtagtaaagatgattttgaggcttatgttttcgataacaacataaaggctaatgatgaccgcaaagctgcccgatatttttactctaactttcttggcttgcgtataccagaaaatggcaagcaacgtacgcgtgatttctatgagctaaccagcgattttataaattcggctgatttggacgcggagtcgagagtgggtatacaacaagcactgcatacctacctgaaagttgatcaaggtgtcacaattcaagttaatgaatttgctcaacgctatatgccagaagaagcgagagatgattacagtcattttatggctgatagaaaattccctacgactgctattgaaaaagacttaagtatcattaaacgtaagttagtgcttcgtaaaatgaacttttcaacaagcataaaacttacaggcccagcggaacttttcgacaaatctgtttccataattgaagaaacagacgaacatacgattatcaagattaaaggtactcttacagatcaggtgtaatgatggaacggcatgaatttattgaactttataaatctgaacgcgctatgtacaaagcgtggtcaaactttgtcatttcaaaaattgatgccgagcttcgttcacgactcgaacgacagtctgtctatgatgagtacgtcaaaattaaaccctctggtcgtgtcaagactgttgactcattggttgcaaaagctttccttagaaaaaaagggaaatacaaagatccctatcgtgaaatcaccgataaagcaggtattcgctttgtagtgcttctaactgatcagttaaaccttcttacagacattgtagagtctcgtcctttttggacattttctaaggataaagagtttgatgagtggcgaagctccgacgcccgtatttttgactatcaatctgtacattacatcgtctatgccaacggtgagcaggagcatgaagggcaattgatcaaggaaggcacaccatgtgaagtacagttaaggactttacttcaacatgcttatgcagagttagcgcatgacactgtttataagaccgacctcgaagtagcaccaagcattaggcgtaactttgctaaaagcatggctctaatggaaacaacagatgacttactttgtcatgccaaaaaggagcttgaggctgcaagtgttgatgtcattaagtggcttaatgccttgaatgctcaagcttctaattcgggcattgtcagctcagatgatatcgatgatagaaatgctgttatttttgttgatagccaccgcaaactactcagtagaagcactgtagaagagttaaaagcttttcttgagaatcccgactattcatttattaatgaaaaaattaaacagcaccaagcaacgagcgatttttttgaatttcgtcagccaataatatttctttcctactttttggcttttcgtttctcaactactttgaaaaattattggcctacagatttttcgatacttcagagaatttacaacgacttaggcatatccccaaattgggcagatgtgtaagtttctgtttactgaatctcaaccatcttcagacaggaagtcctgcacgtaaacccagatctgtcagcccttaatgcagggtaacttttttagtaacctctttttcgctccttaaattttcgcatatataagcaaaagtgcgtcggttcggtcggttcagtcggttcacgcttttaacttactgatttttaatgttcttggtgtcatttttgaaccgacttaggggtcggttcatcactatgttaagtcggttcaagccaccagccaggaaagggatttttaaacaaggtcggttcaatagggttaaagtcggttcagggtcggttcaaaattagagaataaatacatataaatcatataactaaaaatttgaaccgactgaatcgaatgaaccgacctactttttctcacatgagaaattaatcctcaccgtcctcgggtaacatcaataccacaaagcgcggctgcttcccgtctatgcgcaacgtttttcgtgtgacacctttggccggcttatctagcatcccggcatcagccaacacttgcgcgaaagctgccgcattggcacccgtggcaatttcgtcgttaaagactgcagggaaggtgtggaagaccaacgtttcaccgtcaggtttttttacccgatatccggccaggtcttttatggggagatctcgcgggtcggcattagggtgtggcaaatagcggctgtacccaaaacgctgcagaaaggattctgtctgctctacccatgctttagactccctgttctccatgccaaactcatttacccaggcgttgaaactatgctggagcgcgtcacggcattcctggtcatcccaaccggtaagctgcagggaaagaattagcgccccttccagcacggcaaacctcgaagcgacgcggcgcacttgttcgctggcctcctcgggcagcagtcccagccagcgccgttcggcaacccgtaccgcttcagcggaggcctctttctggcaggcgagttgtttaatccattcacgccccacggcgccataattcgatttactggcatcccgcattgcatcggcgtgagatttaccgtctggcaatccgtggaacaccgttgctttgctgatcgggacattcagcaatcgcaccagttgaccggcattcaccttgcccccatccgcccggatatagctttccatatcaatttcaccggtgctgaatgccatcgcccgccagcgcttcacatcgcggttgccgccttctttggctccctggattttacccacgccattgaacagggcataagcagcatcagcgactgcgcggcgattgcttccctgtccgatttcatccagaggcataaaaccatcgttatgcgccgctgcctcgttcaccaaccctagcgcggttgaataccaggtaagtttcagtgcgtcaggctcaccgtaaacggtactggcggcattaccggttgttgttttacccgctgatgagccaccaaacaggtgaacgccgaaaccctcagcgccagcgataccgatcaacggagcggccagcgcacaggcaatgcccagcatcatcgaagaattaccctgcgccagtctggcaacgctctcgcgccagctatcagccgttcccttcacggtgtaccctttcgccgcagcggaacgcccattgaaaaggacggggatcagcggctctccgataacctcaccgtcaggcataatataagccccgcattgccagcctgttgcgccagcaatcgcccacatctcacgattaccgctacgttgcaggtgatcggccagaatcgcccttaggctgctttttgccgtgatagacaaaccaccggcccgaagtttggcccagccttcacgctcgcctatatcgcgcatgggtaccgcctcaatacggttgcgctgattgccctccggtttccagctcaggaccaaataacgctcgctgtcgtcttcaccaataccgaccaccgccagcggagaactgagccagctttcgttattaatcacgtcgccggtttccttgtccaccttcggagtgatccagaacacaccatccttacggctttcaacacgaggttttagaatgtcatctctttgcccgggctttttaccgccgtcgatagcctgtagctgtggtttcacgtcgtaaccctttggttggtacatcgaatcatggaatgctcgtgccgcggcttctacgccgttgtgctgccgataatcgtcccaatcggctttatgctctgtcggtggcagcgatacgccgccagccacggataaagccgctttctcagcttgaatgcggccggtgttaacttttggcttcccgcgcttatccaactctcctggataatgccaatcattgtctgccgcgatgatgatcccacatcgggatgccggcgacgcatcagctcggccacgggtaactgattaccggcatcaatggcggacacggtgagcgcatcgggacgcatcaggctcaaggtgagggccgttgccagcccttcggtgataatgatgccctgcgggtgctcaggcgcgtttacggcatggtatgccccgtgcttggctgaaccgaataccagatttttcacaccattggcggtgatggtctgcgcggcggcaatggtgccggactcattgaccaacgtcagcagcagagcaccgtcagccataatggggaacgggaagcccgtcagccccttagcggtgaggtatgcgctttcacctggctgagcctgcgcggccaatgcctgatacttgtgctgaaaagtttgccggcggcgtgcatcatcggctacggattgctggtggcgctcctgctcccgctgctggcgttcggtcaccaattgctctcgccgttggctggctgcttcgaggttaatttcgactgaccggtaatcaatacccatcacgcccgccagtatctgcgccgcttcggtggtatcgcagtggttcacctttttcaccaggtcaaggccgtcaccggcaccgcattggttgcagaagtgactaccgcgtccgttgtcatcgaatcgaaaacggtcattgccgccacatgccgggcaggccgcatgctgccgcgcagacttgggcacggtaatgcccgccagtgacagcacgtcaggccagcgcccggcggcggcaacggtaacttcgcggatgaggtcaatatttcgcacttttgttactctcttgcttcgcctggatgagtgcctttaatttcttcactttctccaatggattatttgcctgacaccaggccgtcatagcgcccggtttaactggaaaataggcacgatagaaactctccaccggcgaaatgcagggatgttcataaccctcacgggtataagtcacccgcccgggtgtcacactggaaataatgattttcacgcctgcgctggtttgccaaatatcgccggggcggatctcaggtcgagcagatcccccagatatcagcctggtatttaatgatttcattatttttattcctcgcagttggcttctacacgatatccggcacgctggagtaactgcgtgaaaagctcgaccgaaccgactaactcattttcaagaacaggcttgtttgcaactacatggccaccttctaagtaaagcaaaatccgtccagagaaatcacatgaaaggggtaaatcaacgttaatcatcgggctcgagttattcatgtgcactcccactaacaggcaaacgtgcggcaagagacaagataaagtgagcgcacaaaatcaggcgggcttcatgctcggtactggcctctactgtgagacggcagggagttgcccggcgattagctcgatccagtgctaaaaagcggtactgaaatttgcggcgagtttgggtatgctgtgagtcagccataatcgttacctcatataacggtttggttagaggccctgcaagtgttcgagcactgcggggcttcgctattttgggtattacctgtgccttacctgtggataaggtgcataaacaccttaacctttggtgcataaacacgtcaattctttttatattaatattttcgcgtatagtgcatatacacttaatcggagattttagaatggcgacaggatacaaaaataataaatcactcaccaaggggatacgtttcccccatgacgtaatagacgaaatcgaagcaagcattgagcgagagaggactgaaagcccagacgccagtttctcatcctgggtgcttgatgcatgtggacgaaagctcaaagcagaacgccgtaaagctaaaacagaagcacaagaagagtgatccatgttaggacttaaccagaggggaatattcgcattgcttcccttttttatggagtccgaaaactcttccacctcaataaatcgggcgcggttactcttaaaggctttactggctttatctttagtccgctggtgggcttcatccactatagcgaacgtggccaagcgcagcccttggaacgccggcatcgacagatggaggctatgtactgtcataacattacgcatagaccacctcacgcacactggcgcaccgatgccaagtaagcatcgagatcggttttcatgtagatggtttttttacggccaactttgtagaaggggatttttacccgtcctgaactgtgccagttcgccaaggtgcgaggactgataccgatgtaatccgccgcctctggcgggtcattttgtctttaatggatggtactgcgttcataatgtttcaccgtgttagttaggtaacgaccgtgaaactttaacgatagacaaatgacttcggcagagaggataaccagttaactatcctcatttctggttgtgggtgaggatttcttgattatcagggtagaaactagatttcgccctactgtacgtcgtcactaatgagtttgaaatctctattttttgagtcatatacaggatttaagcccgaatccttgagccatttccttactgtttcggaggttgggcaatcgttccatttcgcacgaatgtgagcatatatttcatcttgcattcccccagacttgcatttgggtaagatccccatgttttagaggctattttcaaaaccatcgccttatgtcgattcgtttttcctttttttgctttacttttatcctctctaattttcatattagcgtaagctttcgctccatcatccataactgaaatgataggaataattttcgctactctcatagcccattcatcacaccccacagctgttaacgctaagaaagcattgtgcaatccaagaattgaatcacctatgtgatcctttcccaacgggccgtgtctattcatataatcaaataaatcatttaatcctgccggagactctttttttaggttaaaagaaatttcctggtaactttcaatatctaatgcatgcattttcagaagacttttaacttccctcatataatcaataatatatttaggttcattattttctgtcataactatttttcaactctattctgattaaggaatgaaattaggaagtctctcttttcctgctcagtcatggtgctcacaacagccagtaactgtccgtctatgcttttggctatgtcaaccaacttggcatgctccaaaatagcgcgctcaatcctcttggctggttcctgcagctcatcagcggaaaagtgtaagtatccctgggtaacatccgcgcttctcaatgtgcggtggttcatgaggcgcttaagaatataggacccaacccccaccagctcagccacgctgccgaatgtgcgccgcgcatcgtggcaagtaaattcaatggggactgcgtgccgttttgggcggttgccacacttatcaggctgattacccgccgtggctcttgaatcaccccacctttagccccacggaacacataaggttctttatctcggcgcaacgctatacgccgctgaaatatggcgtggagcgtgtcagttattggcaactcgagcgggtcaccgttctttgtttcgtctatccagaaatagcgaccgtcaagatttacccggttccattccaacccaaacacctctgaacggcgcagcccggtaaataacgccacgtccagtgcatcacacaccgacacggcaaaatcatcccgaatgctggtggatccgtcccgaacggcggcaacagacgccagccagcgcgaaagttcgttatttcttatacggcttgtttttctggtagtcccgtgccatttgcgcttactgctgagtaccatcgtagggggatctggtaataaccgctcaccttcggcgttccggtaatggtcgtgcgcataccggtacacagctcgcagcacccgtgcccataaatcggcctgagctttactaccagccgctataccggagcgttggggcttgctgccaaaccatacaccgccatccgtgatggctttatgccgcccttccaccagttcgcgatcgattgaggacagggattttttcagccaatcgccagagaagttgctcagtattccctcatactgctttgtcgttgactccttaatacgatcaccacgcgatctgatgtattgcgagaaagcatcttcaagcgttactgccctattcctttcttcacggcgggtatcgtttgggttcttcccggttcgtaccagttgcccaagatgatccgttgccatctccctagcctggtcaactgtcagctctgggaatttacccagggttacccgtataaatttattatcccggtaccgagccacgcagaaagacttcactcccgtaggcgtaacccgaagtcgcaagccttgaacgactgaatcagcgaactccagacgcctgagagggtcaggagcgatagcaagaagtgccgcctttgtgaatcttatgctttccataactccccagccccggggatatgccggggatattttacataggtaataatgggtaattttagtgcataatgatgaggagagagaagggataaattgctgatttttctataacaagtaaaaacagtgatttacgtgactcaaaactcataatcgcttggtcactggttcaagtccagtaggggccaccaaatttagctgttaaatcagcacattaagccacttcacgaggagtggcttttttgtttttggggaaactgggcgacaaaatggcaacagagaaaatttagtcggcataaagtcagcaaatgcaatttttgactaaaataaaaccaccttctaaaggagccctatcactgattacaattccttcaagcacagtgaggaatataaaatgtccgataaaagtacccgcccaaagtaacgaaacagcaaatctaccgctccgtagctagctcaacggctatcgaaactggcgcagcagtgcagacaattgagcagaatcttaaacagtatcaggctcaagccaaggcggttggtttagctcattaattgggcgagatgtcatcaacaggctgcaacattggcgtatagttacctgagactcctgcctgaatagccttgaagcagtcattacccctaagataacttaatagattcattggatttgcataccccctgtaacctccggaaagacgcccttccccacaaccttcacccgcgtattctcaatctcccagcgcgcgctcttatcaaagcgtacgccattgagggtgatgccaatcggatgggcagcgtcataaccgcgcatgacgagattgcccgtgccgccactgacatgggtcagggtaatgttttgatactctggaattaaatctcctttggcttcagggtcgtagcgggtatcgaaattgatcggccagcggttgttgcgcaggataacgtcctggaaagcgacgtttttcaccaatcctccccggctggcatcgcttttgattcgcaggcctgaagtggtgccatccagcgttagtcctctgactaaaacgtcgcttacgccgctcgaggtttcactgccgatagacataccgtgtccggcgtagaaatggttatcaatgagagaaataaaatggcttcccccgctgctgcccccttgatggccacgttatcgtcgccggtgctgatggtggtgtgagcaatggtgacatcggttgcggcaccggggtcgatgccgtcggtattacgcgccgtggcgggggtatcgattgtgacgccccatacggtgatcccttcgacatggttcatcgctaaatggaagttgggggaatttaccaatcggatacgatagaaaataagatttttagcctgctcgagctgaataagtcgtggaacgttttgctgactatgctctttctgcgcccgtcgcgcgagctgccaccacgactcacggctgccggtcattggctgcccgccttgcccgtcaatcacaccgtcgccgacaatgccgccgccgttgtttccgttaaatgtaataaatggtcgacagccgtttccaggcgttcctaatgttccacaggttccttgcccgcgatcgtaatcatgaggatcggttgaggcagcaagcacggcgcgcttatctatccaaaggtatacgccagagcgcatcagcaaaggcccactgaggaaacgccctgcggtcaatcgtactgcctcaccggaaggacaatgcgcgattgcagcctggatcctctgccgatcgctgccctcatctttaagcggtagcagtgtcgcacagatttttttcggaaactcaggctctaaaacgaatcgcctgtcggccgcacacacgttggctatcaataaaatgcccaaaaggataaagaaaatcgggggcaaaattgtaggattaaaagccagtttcatagcctgtcgcgccttaaaagagtgatatctcagcatgctggaaaaaatcacaaccggatttaaacaaattataagtaacgaggtacaatctcgcgggataagataaaaaggctgataatcaatctcagacgaaagaggtacggacatgcttggaaagtggcttttcatcatcgcagcatccgcagcactcctgatcttcattaactgggcgaagatctggccgtccatcgagccactacttagataaaactccacgggagacgacaacatgaaagaaggaccactgaacgagaaagagctggaatggcttgaagaggtattagtcaagtacggcaatgacgattcagttctggatgttgccgagctggacggctttctgactgcgattctttcaggcccgcgcatgattgagccgagcgaatggctggtcgcgctgtggggcggtgctgaaaacattcctaaatgggcgtcagagcgcgagcttaatcgctttatggacctgaccttccagcacatgaatgatatttccgacagattgattgattatcccgatcagtttgagccgcttttcggcgtgcatactattgatgacgaagactataccgtcgccgaagagtggtgccacggctatatgcgcggtgtcgatctggatgactggtctgcgctacctgaatcgcttacggcttctctcgacaccatcgctctacatggtcgcgatgaaaacgaagcgcgactggaagcaatgtcggatgaagacgttgaagaaaatatcgagaacatcattcctgccgcgcttgctctgcacgattattggctgagccagcagtcggacgatcctgctccggcagcaacgccgagcgttgctgcgccaaaaattggccgtaacgacccttgcacctgcggaagcggtaaaaagtacaaaaactgctgcctgcactaacagtagaagccaccgtgccaaacggtggctttactttcttgccctttccgaagcgcattacgtccgccatttgcttgtaagtatcccggctttagttccacacactttttgagatttccggtttctcagccatcagccgggatacttacaaactcacgatacaattaagaaacagatgaagaaaccaaaatttaggcaataaaaaacccgctttcgcgggtttaacgagggtgcaatggttgattaatcgctgccgaacaggtcacgggtgtagaccttgtccgccacgtcgttcagttcttcaaccagacggttagcgataatcacatcacattcctgcttcagctctgccagatcatgggtcactggggagttaaagaaatagctttcttcgagaacaggttcgtaaaccatgacctcaatgcccttcgccttgatacgcttcatgatgccctgaatcgcagacgcacggaagttatccgaacctgctttcataaccaaacgatagataccaacacgtttagggttacgtttcacgatgctatcagcgatgaagtccttacgcgtgcggttagcatcaacaatcgcattaatgatgttatttggcacgttttcatagttcgccaacagttgcttagtgtctttaggcagacagtagccaccgtagccgaacgaaggattattgtagtgcgaaccaatgcgcggatcgaggccgataccttcgatgatttcacggctgttaaggccgtggtgctcggcgtagctgtccagctcgttaaagtaggcaatacgcaacgcaagataggtgttagcgaaaagcttgatggcctcagcttcggtatcatcggtaaacagaaccgcgatgttttccttgatagctccttcaaccagcagatcggcaaactggcgagccttttcacttttgctgcccactacaatgcgtgaaggatgcaggttgtcgtaaagcgcacgcccttcacgcaggaactctggcgagaagataatgttgtcgacgcccagcttttctttcaggctgcgggtgaatccgaccgggatggtcgatttgataacgatcgtagcccgaggattgattgccaggacatcgctaatcaccagctcaacgcttctggtgttgaagtagttagataccggatcgtagtcagtaggcgttgccacaataacaaaatcagcgttttcataagcctgatgcttgtcggtggttgcagtaaagttgagatccttcgtcgcgagaaactcttcagtttccttatcaacgattggagaaatcttgttgttcaacttgtccactttgctctgatcgatatccagagcaacgacttcatgattctgcgccagcagaataccgtttgagagcccgacatagccggtgccggcgatggttattttcattggcaacctacaataaagttatacacaaaacaccaaaataaaacttacttaacactgataaaatgccatgaacaagttagatagattctaaatgaaagagttcataaaatttttatcagcatcagcgcctacctttctggcgaacaaagctccgctttttatgatcttatcacgatcgctatcgttaagtatcctcggatactctgggccagtgacccaatcgatgtatcgaagtgcattgttgatagctaaaggatcatggtaaatattaatatcacttttagtttttaatatactgtgaaagaaaacctcatctgcacaaagagaagatgaaaacgcgtcaacaaacttcttgttctgctcgacatagttaatgataaattcgacagattctctagtgagagtgaaccaatttgtgcctttataaagctttggaaactgattctggtgagaagtatattttttattgataaaaaattgatttttgaacaacttatgaaatttcctaatcaacttccccgcaacagtagatttcctttcatagaatgcttcaggatagacaaatcggactctttcgctagggtctacgaagctattgcgtgaatcctgataatgaatgaattctttacctatgttcccaactaaaagttcatccatatcctgattgctcatcactggaatgtcatccccagaaatcaggaagaaataggcatagtcagtgccaatggatgatttcatcagtcttagagtggcttctatctgagaaaagcgcccccactgaacgtcaacgcgttccttcacaagtctcacattctttttttcaagaaaatgaaagtcatttatgttcgatttagcatctacatgcaatatcaaactattattatcatatgaggaaagatactcaatggtgtgaataagtggcgcagtgactttatggcaaactatagctatgatctttttcataaataccttctctctaagagagtaaacaggctttaactcactcaagaggcaatcaaagtgaaaaaattaagattaatcgcattaatcatttcatctatcgtaatgctggaaccagcacttgcagcagagaatttatcaacgtcagacaatgatactaatggcaatctaattaacgcccatgccggtggcgtgttttacgaaaatggaacatattattggtatggagaatatcgaagtccgaaaccgaaaaacaatgctcattgggacagtaaccaaaaagtaactatgtataaatcaagagatatgcataactgggaatacattggcgttgcattagacctctcaaactccccagagaattgggatcttgaaagaccaaaaattatctataatgagaagaataaacaatatgtcatgtgggtgcaccttgaaccacagaggcattatgttggcggatatgctggcgtcgctgtatcaaataaaatttccggaccttataaattaataaattactctagattgaaccaaggtataaaacctatcaataacgatcaagggaagaatggtgatacaaatgcatgggccgcagataatacattcaggaaattcatgcctacaggacagcaagttagagatttgacccttttcgttgatgacaataagaaagcatatttaatttatgaatcagaagacgatttatccctacaggttgcagagctaaacagtgactacacatctaccactggtaattattcaagggttcttattggggaaaaaaatgaggccccaactgtgtttaaaaagaatggtaaatattatcttattacatcaggcttaagtggttataatgctaatgctgctcgttcagcgactgcagataacatcatgggaccatggcaagatttaggaaatccagtatatagccagaattctgatgacgttagtactacattccactctcaaccatcgtatatattcaaagatccaaagtcaggaaatctattgatgcttgcagataaatgggatacaactgagggtggttataaaaatttatggaaaagtacttactcttggcaaaatattaagtttatagacggaaaaccaaaactggcagagccccaagttagtaagtaaaaattaatttactttttaaataaaggcttcattattaaggtactaagatgaagcctaaatattattccttttttaaagaagtaattcagaatagttagagacaaaatttcagttgttaatgtagcaaaggcggcgcctaaaactccataatgtcgaattaaaaagtaatttagccctatactaatcaaagttacacaaaacattttctttgataggaaactgtaacctgagtattttgcgataaaacgagcagatatggtaccaaacatactcacacaagttgatgcggtcagaattactaaaggaacatatgactgtgcaaaagcatgtccataaagtaattttataaaatagccaccaaaaaaatatacaataatcattactggcataactaatgttagtatgattatgtttaacgttgatgttttaagtaatgccttgtggtcatctttttctgagaaaatacctggtaaaaaagatgttattacggaattacagacaaacgcccaacatccagctagagtagctgcaactgatagaataccaacctgagcagagctttgataataccctaacattaacacggcaagtctaggataaattgctactgatagtgaagatacaactaagttagaaccactgacaagtatatatttaatatacttagccttatttttaattttgactaaaacatacttatgctctttcctgaaactaagatacctgattgatagaggtatcaagctagttaaaacaatcggtatgcaaagtaccaatggatttagcattaagaaagctatgatccatctaaaaaccaaactaaccagtaatcccagtatattaaccaaggtgttcttttttgactgaagttttgcgtcatagaaaatagcataaacatcaagtgaagaaaataaacatgcaagacaagatgctaaaacatataaaaagccatcactatctttagtaaagtagaaaaagcaaagtattggtatcgaaaccaagagataaacaaataatctcaaatgaatagtcgaattaattaatttcacacctgaaatatagtttttcgagactctcttgaaaattattacatcacttccaagttgtgctacaacttgaacgatttgaaaaaaagttgtggctaatgctatctgaccaaatacgcttggcccaacatatttagcgacaaaggaagtaacaaagattaatccaaaaattgaaattatcttctcagatatcatccaaagagaattttttatcgctttcttactcaaaatgatgctctctataaccgtcaaaattactcagacgctagttcatgtccaatccaatcaccgtctctgttaataaatttcaagtaaccattaaaatcattatcactgtagagaagcaaattgaaagttggagtataaagtccttgccagaggtttcccaacattattgggcggcgttgcaaatatatactttggaagagaaagttaaatactaccaaagcacctaacaaaataaactttaaagacttagcgcgatcttttagataaataaatgcagctataaatagtaaataagagccaatattattcaaatatctattaaatgctgtgacagatattgcaattaaaaaacaagaaacaagatatacatttaaaaagttaaggaatttattagttcttttttcatcatcataaacagcaaaccaataaataaagaaaaagaatgcgtcatatgcatatcgatatatagaaactattgctgcattacctgtagcctcagtattagcaaatccccctcaacatatccagaggatgcataatcattaataccccaaggtttatattattcagaacatactttaaagcaacactgctacataagaaagcaataatggaaaatagaggtatggtccttttcttaattttaacaaagttagaaccgactaaaaccgctatagggaaaagcatagaaaagtgagttagtgctgcaagcaccatatatagaattgagcgttttcttttacgagtaaaaaaccaaagtgatacggccctaataaaaaaactaactgcaaatgcatatctaagggttaacgctgcacctagtaaattaactgttaagaaaattaacaaataacatatgcgcctatatttatctgaagcttctatatgatttagaatatctcttgcagcagaaaaatacataaatattattatagctgattgcagtgctgggtagataaagaatggaattccattctttttaaaaaatagcaatgttacatacattattatatcgacatggcctttaataacatcaatataagatgtttcattattgtatgccaaaaaatttaatgtatatctcctatataaatcttgataaggaggaacatagcagagaacactaaaaacaaataaactgataactaaaaagtacttcatttcgtcttttttgctgagtgttttaaaactaataagtgcaccaattattggatttactaaagtgacaaaaaaactcaacaataatgactttcttattctatacatgaaaccctcatcacaacggctaattcaaaacttaaagcttgaaagtgaaactattcagtagtctcatatagagagcaacaacgaaacactttactcttttcttaaagttcacatgaataattttcggaagttcatcatcattaaatatataactttcagaatttgataagtctacagaattaacaatacgatatttttttaacttttcatcatctggaagagaaaacccacgtctcttataccatatctcttctgagactatctcatgcttgaaagtatcacctgacatttctcgactgcgcactaaaaacctatttttaatttggtctagtgttctatactggaaatgcttaagtctgatacgacctgaggcagcttttaatagattacaaggccagccttcttcttgtggccaacacaaagttctcttattttttacaaatcttatttcagagtggttacatttataccattttaaccgatcataatttaactcagcacagtctgaaagatttaactcgtttctgtagtcttgttcagtataataatattgaaatgatgcgttataaacatggtcaatatctgttggcaaattcttaagaaagtctttgggattatctatataaaattcatcaccatctaaacggcaccaccaatcattttcactagagaaaccacgatactctctatacagtatctgacgtaacccttcattaaacttaccgccatattgcccccataatatgacgttgtcatatttatctttaagggcattgagtttttcccaggtattatcggtactcatattatcgataacaaaaattttgtcagcccacttcgttgctgactcaattgtatcaaatataatatcaccctcgtttttcacaacaacgagagcaaaaacattaaagttgtctttcatctatccctacctgaattctatattttactaaatgttctttttctactaacaagggcatgaagtttcttcgcaaagcttaatttctttaatttctctttaagatatattttaaaattagttttagttatgttttttaataaactttgcaaagttacaggttggcttctattaagaatgtcctgaaaatagagatttttaagctgtttgttatttaacgtgctcatatgcttttcaatgaacatacgataccctgcataggcacggctacctgtagttatcctcggccgattatcatctacataaaatatataggtcggctcacttagtttgtaacagcttccaaattggctaaccaacctataccacatatcataatcctgccaggcaggaaactcagtatcaaaccctccagcacttttgatatattcagttttggtgaataattggttaccgataaggtttgcactgcctagcatttcgcgggtgatctcgccttcgaaaatgtcaccgacacgagtttcattatcattccgatagagtctacttgcgctaagaatatttctaccctctaacaaatgacgttctataaaaagctcaatacgattagcggtaaattcatcatcatcatctaggccagttataaactcaccctttgcgcgttctatacatctattcctggaatagcacgctccctgagatgtttcattaacaacataacttatacgaggatctttatcacagtattcttgtaatatatcgacagtttcatccgttgaaccatcgctgcaaattattaattctaaatttttataagtttgattcaaaactgaatcaatagcacgcctgattaatgccctctattatgagttggcatataaacagtaacgagaggcatgacttcattaaagttagttttctccattcttcttacctattttgttttgagttaactttaataacaatgccagccgaggagaaatttttagcaaaagtaagtataactttactttagaatccaaggaattacttttaataatattactggctctaaaaatcttgccatcagccatcaatcttagcttatcaatgtgctttagtccgccagcagatttttgatttattattatgcatgacgttacaaaaattccatgaaaaagatacccatttttgtaggaatcttgatacagagctagagaattatttttttcaaggaagtttttaatattatttaaaatgataaacttatgctcaatgatattttcgttaaaatctcgcataatagaaccctttcgaattctataataataaagcggttcatctacaaatttaactttctcttgataaaagactttataagctatggcaaaatcttcaaaaagcatcccttcagggtaatgcagtttgctaaatatctcgcgcctatagattttaccccaagcgttgggaatgaaatttatagattctattacgttgccatagataattgagtctgaagttttatcaaagttattatttacggccctgataaattggccagcgtctgttacctcagtgtaaccgcagcagcaaatatttgcatcaccgatagcactcaacattttttttaaaaaactatgatcaagataatcatcactatcaacaaatgtaacaaattccccttcagcgtattgaagcccaaagttcctcgccgaagaaagtccgccatttgcttttgttactatacgaaaatcggcatacccttcaatttttaatttgattttatttactgaattatctttagacccatcgtcgacaaaaattacttcatagtcgtcaaagtcttgttttattaaactttcgacacattcttctatataactttctacattatatacgggaacgactaccgatatttttttcatggcattaaagacctttcacttttactctatctttattatataaaaatgaaagaacgccactaggcgctattcgcgttgccgatctcacgaggaaaatcaaccaaccattatatttcccagtaagcctgagttccctttttaagcgcatcaattcaacttcgctcttaatgtagttaattcctcgacgcttctcaaccatctgctttccaactcgagcattaactaacgtatcaggcatattttcaattctgaatccagcagatatcatcctaagccaaaggttgtaatcttccatataaagatgatgcctgtagccgcccacttccatcacacgagattttcggaatacgatcgtcatgtggttcaagggatttttccaaattgaaaactttctgatctcttcattgttctcaggcaaagcttttaatctttgattattttcttcatcaaactcgataatgctcgttccaagcatatctacatcttggttttcaaggatgaagttaatttgtttctcaaaacggttaggttgacatatatcatccgtatccatacgagcaacaatctcatgttggcaatactcaagccccttttgtaaagcccgacctaatccaacatttttctttaatggtagaaccttgatatttagaacatctttgaatgactcaacaattgcgtttaaagagtcgttgacaaaaccatcataaacaataacaatttcatcagcttgaagcgtttgagattttatactttccaggcattcccaaagattttgtggttcttctttattatataatgacattaataccgaaaacataaacacctcttatatataatcacatttagattatattaaaacagaaagccattcttttaatattgcattcccggtaaagttttcagcgctcttaagagagttattacttaattcatgtcgtaatatctcattctctaataacgcatcaacttttctaataaactcgggatcatcatcgtaatcaatgacaaaaccatcatccttaattatttcgactgggcctgtctgacaattaaaagcaaccgctggtaaaccgaagtttttggattctatcaaaaccataggtaaaccttcatatcgagatgtcattactaatagcgatgactttttgtaccactcatctagcttatgacttggattctcaataaatacgtttttcaaaccattcttagaaattaactcttcaagctctgcgcgatcctcaccgctccctataataactagtttccagccagaagaattaatcttcttccataggctaattagacgttgaaaattcttctgatacgtaaggcgacctaccgccaatactattttttctttataaccaatatcttgtgaagaatatacagcattttcataaggagaacagtttctaacaactttaactttctcacctagttttcgagacaaataaactctatctgattcagttaaaacaacaattttatcggccattttatatgcaggccatttaataatctgaatcaaacgagagaaagatttaaaagaaacatgatcattacaaattattttcgctctgatattcaataacttaagcagagggacggcttgcgcagacaggcgtcccattgataatactatgacatggtcaaaattattctttttaatagaaaaacaatattcagttatatttcttattctggatttatattttggatttttaatttcaacgcgagaatcaaaagaataataaggcttacctggtgtaagactataaaccgatgtctctataccatttttgacaaatagtgaggagatgatagaggcaactctatctgtccctccactatttgatattccatcaatgagaatacataatttcattcttaatacgcgccatctcgcttaaagactacaccaatcgttttgaacagaatggcgatatcattccacatagaccagtttttaacgtaccaggcatcgaaatagacacgagtttcatagtctacgtcactacgtccgctcacctgccacaacccggtcattccaggcttgctcaacaagtaatagtcgacctgatcgcgataacgctcgagctcagcgtgaatgataggacgtgggcctaccaggctcatctcaccttttaacacgttaaacagctgagggagttcatccaaactggtacgacgcagcagtccaccgattttagtgacacgaggatcgttcttgagcttaaaggtttcttcccattccgcacgtgcttcaggatcggtttccagcagctcagccaacagttctttcgagttgattgccatcgaacggaacttaaggcatttgaacggcaccccacccttgccaatacgctcatgcccgtaaatagccggaccgccgtctttcttcaccttgcggctaatataaaacagagccggggacagcaagatgataatcgccagagaaaagatgatatcgaaggtacgtttgctaatacgcgatgaccacttggccaaattctgatgcacacggaaaatcatgacttcatgactaaagataaacgacatatctgtgctgtctaacggcattcccctcagtgttggaatcaccgaaacgtagcgataacctttaatcatcaactcacgtaaccaggaattgcgaatctcaccctcatcattttcgaccgcaacaataaactgcattcttttatcaatgccattttcaagccatttagcattgctatgaataaccggaagaccttcgagacgatcgtctggcagctcggaaggcttatcggaaataaaacctataacacgcagtcccatgttggtttcatcgctaattgccttgtaagcttctaccgcattcttaccgctaccaataatcatggtatcgcgctgccagatacccagtttgtccaacacgactttggtcagcatacgagcagtaggtaccagaagaagcaccagcgcccaggtcagcacccataaataacgtgagaaataccattttgcaaaagcaataactgcgatttcaacgatcgcaaaaataagcaaagtacgaagaatttcttttaattcgaaccaaaaggttttgcgataaaaatagtggcgcaaacgtacaccgcaccaaataaccatgcagcaggctaatagccagtgaagagcaatccacccttcaatttggttttcaggaacctgaacgtcatagtggtttaacgtcagctccaatattccaatcgcaatatatagcgaaagagcgaagctgataaaatcagacagcgccagggcacaagtcacccataaatttctggcaaaacgcatgatgtgggtcctcacaaaggagaaaaagcaaaacgagagaaggaaattgacaggttataagtcgggcctgactggcatcagacccggtaagcgctatttagtcttttttatcactgtagctataaccatagtggctgtagccatagccgtaataactgcttgctttcttaacgacgccattgaggatgcagcctttaacttcaacgccactttgttcaaagcgctttacgctaacttcaatttctttcgcggtattctgttcgaaacgagcaaccaataaagtggttcctgcgtaacgacctactaccgccgcgtcggtcaccgcaagaatcggcggtgtgtcaatcataacaaggtcgtaattctcggaagcccactcaagtaactgcttgaaacgcggatgcatcaaaagctcaaccgggtttggaggaagctgaccacgggaaataaagtcaaaattcaccgcaggaagttttttaatgcactcttcagccgttgtcttacccgccaaaaggtcggataagccgttctcaaaacctgtattaaacagtttgtgggtgtaacctttacgcatatctgcatcgataaacagaatacgctgttcgccctgcgcgagtatcgcagcaaggttactgctgataaacgttttacccgcattagggcttgcgccggaaatcatcagaatattatttgatgcttccatcatcgcaaagtgcaggctggtacgcagaccgcgaattgcttcaatggccaagtcagccgggttctcaagcgccaggaaactcccccactcaacctgcttacgggtcttgagtttgcctgttttagcaacgttttgtttattaagccattcggaaaccggcacgctggcatatacgttaatgcctagttcttcaagttgctctggagattcaataccacgacgtaaaataactctaattacgaccagaccaatcgataagaacgcgcctaaagccagacctatgagtacaattatgggttttttaggcttaacaggttttggttgagtaactgcatcatcaataattcgtacgttaccgatcgcactcgatttggcaatgctcaactcctgctggcgattaagcaattgcatatagattgcacgaccagaatcaacatctcggcttaaacgtaacacttcttgctgagtagctggcatacccgagactcgcttattaagcttacctttctcttcttcaagaacagagcgcttctcaagtaaagccttataggttgggtgactcttggtataaagctgagaaatctcggcttcacggaaggtcaattcatttaactggttatcaacgttaactatctgatccaaagcagacttagtttctaatgaaaggtctacggaatcactcttacggcgataggcattaagcttatcttctgcagtatccaaatcactccgcacttgagggagctgttggctcaagaactgcaaacttttagcgtcctgagcagcctggcgatcaatattttgtgccagatagttatcactgatgctgttaagaatatcctttattaaggttggatttggtccagctaaggtcagatttaatatgccagtatctttgccctgatctacaacattaaatacactttgcaatgcgttaattgcatcaaggcgcgtcaagtatgaaatattaaattgtgtgcctggtttagcatcaatcctgtcaactaacagtgaaacaccttgttcactcaggagctcccctacagttcctttaaaatcgtgagttaaaattttgcccgagatatgataatggtgggaatcatcgacagtcaggactatcttcggtgccttaccatctggactcgccagatagagtcgattgacggcaagctgacccggtttttcccccatcattcgtgcccagccgcggccaaacaccggaaaatacttctgctcaatatcagcctgaagattcagatcatcaaccgttttaccaatcaccatacgagattgcagcagggcaatctcgggcgtggactgtggttggctatcaggcaacatttggctaagactattaatcagagcattaccctgtttttgctcaacctgaattaacgcatccgcctggtaaataggtgtcgcaaacaaagcgtaaataatcgctaacacggtaaataccgcagtaacgctgataattaatttacggtgatcgattaattcaccgatgagacgccccagatctatctcatcggagtccggagttgccggtttattggaaataacagaagacatgcaataaattcctaaaagttagccacccagtttcgctgaccagctctggcaagcttgatcaattaactgatatacatattcgaaagcttcctcgctctggcgatatggatcggggatctcttttttatttagccagtgccctaataaaagggtttttccgcgagcttctgtagcctgctgggtgacctgctcaacgtgagatcgttccatcaccaggatcaggtcatactgtctggccagctgggcgctgaactgccgcccgctgtgtccttcaagagaaagcccatgcttttcagcagttaacgaggcctgttgatcggcctcgtggccgactaatgcgccgacccctgctgaatcaatctttttatccggtaataattggcgcaaccgcctttctgccgttggcgaacggcaaatattaccggtacaaataaccaaaaccgaattaaacattcatcattcccagttcttaatgtattgcgcagtctgtactgaatagtaagttccggtaattgttgggaccaattgtgaaataacgcggttccagcgaacaactggagcagtagtcacataaacaatatcgtatggtttaagttcaaactgcgatgccataaccattgcagatgcgtctttcgcattcagctgataaatattggcaatatgcccatctttatcccccctctgatctggcgaataacaaatatgccggatgcatcagactcaacctggctaacaccgttggaattacccagcgcttcagccaatgtcatgccactgcggtccataatctgggtgccttgcttgacaacttcccccattacgaacactttcagattatcgttgcgtggtacgtacagaatatcacctggatacatcaggtggttctgcgtcaggtcgcccttctgcaatagtgcatataggttaatagtctggtctttgccgtcgtgagtcagcacggcattacgccagtctgcatccgtcgccaatccgcccgcatcattaattgcatcaataactgtaagcggaatattactgatcggtaattgacccgattttgaaacttcacccgaaatataggccttctgcgaacggaatgctgccacgctcacgtctacctgcgggctctcgatgtaggtaaccagtcggctcgctatctcactacgcacttcgccgatagttttgcctgctacgtgaaccttaccgatgtaaggatagaaaatatccccatcttctccgacccagttacctgtgtcagcggcactacgatattgacccgcaggcgttgtcagctctgggtggtcccaaacagtgacatctaaaacatcgccaatcccgatacgatactcatagttgttcagcaaggcgtcaagctgaggattaggtctggaaataatcggatttgggcgcattttctgcacgatactcggcgtcattggatagacgttaatcttctgattccagtctgcatcgctgtccggcagctctaccacatttttgcgcaggctgtttataccctgtcccggaaccacagtacacccactgagtaatcccataaaaacagccactgctgtcaacttgattgcatatttttttgtcattgagttaattcaatagttagagtcaagttaaggaaaggacgcactaccctcatcccctattttaatttccgcacgcgttatgcaattcggctgattagaggtttaaagggacatccaactgcgcacttgcacccacatcattgctgtcactgtggttagcatcggtataccaaagtccaaggttcaaacgtacagagcgataaacgtctccccccaaccgagctgtacacccttaagggtgtcggcatgcgggaaggcatggttgatagcttcgctttcagggttaaccttggcatacgcaagacgaatactccaacgctggttgtcttccgtcactaactcggttttagccgcaagaagctgtccatcgccgcccattgcatcacccagtggatagccctgctggtaataaccgtcggtataaatgtggtgggtataactgtagcctgttcttgatctgtcggtacgcgtatcgtgaccttcgagataccagttaatagcatctttattccagctatggtgaccttcaacacccaccaaatacatatttgccgaaggcagtttgccggactcatcttcaccgatcatctgaccatagaagctgactgggatacctaatgttggctcgagtttatatttgaagtcgaaaccagccagctggttacctggctcattagggtcattaggtgcggtattatcattaccaattgccgcatcccagaagttatccaacgattcaggacgcccctggccaccccattgaataatacgtgaagctcctaactccaaagaacgccagggagaaatgctcaatcgggcgccaataattttggtatgaggaacggcggtatactgtgcctcctgcgccgcggagatttgatattgccaaggaccgacccagttcatccaccaggttttcggtgcatcctgactatcacgttgcagcataaaaccggttagcggtcgtgcagcatcggaacgaatcaggctcccttcataacccggtccccaccattgtggagtctgaccgaatgaaagccactggtcccaaatttttacagcaccgtagctgttattaaggttaacgtgtgaaggggaaccgatttgctcgtcaccttcccagttggcctgcagatgtacgtcccaccaatctccgctctggtttgctgccaaagacagtttattatcggccgtaggtgtctgtgcgaatccctgtggagtgcctggcttgtcggttgaagcgtaaccggtaatatgaacatcggatttcaggctgcgcaggcgttcctgaaccctttcaatcgcgagttgctcagaagaataagaaggatgggcttttttcaatgcctgttcgacggcgtcctggctaagtggccaggtggtcaaacttaactgtataacgccacggtcagccaaccaggttaaatcagaccgtaaatcgttgtcaggaagaagcaatccgttggcaaacgcactgcctaatggtaataaggcaagcccgatacataatcctagaaagcgagtttagaacgagctggttttactgccattgttttttccatcagggtaatccctctcctttgccgatgatgacggtttatggtcaattcaggatggacagacccatccgtaatgtcgatatgggaaaatagcgcaacgtttatagagtgtataagtcggctagttcattctgttgaggttcagacagcataaccaaatttaatggttgcacggctgataatgccacaggggctgtagtggttatagatttttcaaccagtggcacgtgaaatcgcttgaaaatgacccacgctaccgccttggcttatcagctaccagagcactgtgggcttctagcccgttaatcgctgggcgattattccgttttttttaaccaaaaccagtaaatatgcttatttaccctttggttattgctcactgaccacaacaaactttctatctatacacagcgaaaaaccggcacctttaagacaagtgacggcttgcgatatagaaacagaatgtgagttacccattatcgacacattgacttaattgttaagaaaaataaaacgaaatcagtagttaattttacttttttttgtaacttacttagcaaaatttccccattttcattttcattcttaaccttacagttcctcgtcgttatcatcgaccccgcaagttaaacaaaattcatagtcataaacgataggaaaaaacctgtttttctattgcttgcttaatctagatcaaaaaacgttgacacaatgtctataagggaagccgacttttgtttcattagcctcattaaccactctgaaagagcgagacgaaatggccatttcaataatgaaacagtaaggacttatcgttacaatttgaccttcagaatagggcaatattaaggataatttcagcaaaaaatgaagagaaaacggagtgattaagaaagggatgtgggtaagattagaaaggtaattcggtctggcggctgagcaaagacttcgctgccgatgtacccagtttgtggccttcaagcgtcagcagaaatgactttgcttcaagcccaccggcaaatcctgtcaaagcccctgaagcgccaatcactcgatggcagggagcaataattgaaataggattacgcccgttcgccgcgccgactgcgcgcaccgatttagggttaccaagggccagcgcaatttgcccatagctgcgtgtttcaccaaaagggatcgcgagcaaggcctgccagacctgtttttggaacggagttccctgaaaatctaaatccagctcgaactgtgtacgtttaccagaaaagtactcattgagctgtagttccgttttcaggagtatgggcgagtggttgtcctggattaagctgcctaacctgacgcggttttcacgctcgtgctcccaaagcacagcggctagacgacggcctctggcaacaagcgtcaatacgcccaccggtgagtccattagtttgaaggcgttttccatatctaaccctggaggcagtaacaagacttccaccagtgtagagaatgtcggctgcttagcaaacccaataaaagataattatctcgcttctttctatgtccgccaggcagcatcacgctaattattgcttcgacatctcggcctgaagctcggctttcgccgcgtcatactcgcgattgaagtccggctgctcaaacattttctgtgcaatgagtgcagcacccgtgcggctcatcacggtatctgagcgatagtggaacccagcaatcagacggttttcagcataatcggacgcacgtgcaaacagcgcgttgcgtttttcaggaaccatatctcctaacaccgtcgccatcagataccctaacgtcgaatgacctgacggccacgagccagaactggattttttcagcaacggatggatctcatcgttaagcatgtagggacgtgggcgatggaaatattttttagcgcgatcgtccaccacgtcttcggtcgaaacgatgcggtcaaaaaaagcactcaattttgggagcctggctgcatcgaaatttggccccatcacgtcggcaaagcgccacacattttcctgtgcatcagcgatagcggccttctcttgctcaggggtacgtttcgcctgaatcgccagaagttcggcgatttctgccttggtttgcgctgaatcatccgccggaggtgcaggcagatactgagtcaaatctacctctttggcggtgataaacggtttggcttcgtcggcagcatttacgttgaatgctgccccgaaaataaggaaggcgagaacggcgacgaaattacgcaaggtaaaactcctgatgatgggaaaagatggcaggagtttattgagagaacgtgacagtcaaatgacaaaaaatagccgctttagagtttgattttgtattgataacctattttcatcaatccaaaactattgcgagcacctaatttctgcatcacatttcttttgtgtgtttgtacggttttatagctcacgcccaggtgttcggatatttccactggggtactattatttaataacagcgacattacccttagttcgcttgaggttaatgacagctcgttattatcggcattaacgatagccagcagattggggctgcaataataatcaccggaaatccctttattgatagcatgccttatctcggaaatatcgtcctttttcgagatcaaaacacgcgccttgcacttcattaactctttgataagaaaaatattatcaacatccgtaaagacgatcagtgtgacgttgttccaatgctgagagttacgccgtataaagtctataccgtccataggaaataggtttgtatcatatatttccatgacgataacgtcgatcatttctgcatcaagcatagactgtaacggtgggaaaccttttaacgcccccgaattttaatgtcttcaggaattaacgttctgatggccatgcaggtaaaggaatggggttccattaagaccaagtttttcatagttcccttaaatataaagagtcatcctaacggcacataaaaatataaaattacccgcacatcatgaataggctttattttgttaatttcaattaagaagtaaaaaaccataaatcacgcttatgaccattttttatatcgccacttgttgattttggaaaacttaaccctaacgagatgaacccagaatgttgcttttcgactcaactttacataaaagcaacaattatcgccgcagagtagtgataggatttttcttagtaaagcttttgcagctagaaacaactccaaaaactcttatgagttaatgtcaaaaatgttcgggtttggcgctaaaccggccaaacaaaaaattttgcattaatatttctactgttttaaggaaaaaagtgtttcagctttgctcacagcgctaagccaatcaatctgtgcatagagaggccaaaaccctcaaagcagtcggagaggccatggggcgaaaagttaaattttcgttaaaaccgcataaggctgaatatttttataacttttatgcgatttgtgagggttaatattccagattgttttttgcacaaaatcgaaagccaatgatagaatgtgacctgaatcacactttacatcatttaacttttccaattttctactattacctatttagattcagtgcgttgctctgaaaatatgttgtttcgtaagcgtaaaagattgactgcattataggaacccattcgatgaataccctgactactggattcatgatgatgcgctgggaattactgagcgcacttatgatgtttttcgccagccaattaaatgtggtttgccgtcaaaccagtaagaacactctggcgttcatgtgtagcggcctgggcctctctatgacctgttggtttgtgatgggattaatgggaatgaccttcagtattgaggccgtgactcagttctggatgacctccaaacatgtgttcatcgacattatgagccagaccccgactaactggccaatgccttgatatatatatttttatttttctaatttgctagtgcggcatcgcgcgctcttctttgctgatgccgtttgctctttcccttattgacctccctgccctgctcttttattgcctctttaatgcgccatccccttgccaaaatttgcgagccgcctcgacagaaacaatttttcctttgttaatcaaatatattaattgctaaagcgcgaattaccgtattagattctctctacgcattatgcctaatgtataaaaaactttatctgtatgtttttatgagctttacccatacgctgacgatgggacaagggataattaatgaaaacgcatcatattattagcgcactctttttgacgttgagcgctccgctttatgcccaaagcccgacaacgcgtccagaatcctcgggaattccacagttgcaggtcaaagcacgtgacgcctttatttccggcctgatgaaaaaaatgacgctggacgaaaaaatagggcagcttaatctggtaagcgtcgggcccgataatccaaaagaaaagattatggctgatatcagagccggcaaggtcggcggtgtattcaacaccgtgacaaagcccgatattcgccgcatgcaggaccaggtacagttcagccgattaaaaatcccccgttctatgcctatgacgtcgttcacggtcagcgtaccgttttcccaattagcctgggtttagcctcaagctgggacatgaataccgtggcgcttagcgcacatatttccgctgaggaagctgccgccgacggcttgaatatgaccttctcaccgatggtcgacatcacccgtgacccacgctggggcgagtgtcggaaggcttcggcgaggacacgtttcttacctcgcgcatggcctatgtcaccgttaaagcctatcagggcgacgatgcgtccggaccagaaagcgtgatggcaaacgtgaaacattacgcgctgtatggtgccgtcgaaggcggtcgtgaatacaacacggtagacatgagcctgtcgcgtatgtttaacgactatatgcctccttataaagcagcaatcgacgctggcgcagacggcgtgatggttgcactcaactccgtaaacggtgttcccgcaacctcaaacgcctggctgttgaaagacgttctgcgcaaccagtggaattttaaaggcctcacggtcagtgatcacggcgcaatcggtggtctggtgaaacacggtgtggcggacaacgaccgtcaggcagcagccatggccctcaaggccggagtcgatatggatatggccgacgacatgtacggcaaatatctcaagggcctgctgaaagatgggctggtttcacagcaggatatcgaccgcgcagtgcgggatgtattaaccgccaaatgggacatgggcctgtttgcagacccgtatcgtcatcttggtccggcttctaccgaccctgttgataccaatgcagagagccgtttgcatcgcaacgaggctcgagaagtggcccgcacttcgttggtgttgcttaaaaatgataaccacaccctgccgttgcagaaaaaaggcaccctcgcgctgattggccctctggcagacagccagcgtgacatgatgggcagttggtctgcggcaggcgtagcgaagcagtcggtcacggtgctcaaaggcatgcaggatgcactgggtgataaagccaccctgctttacgctcgcggctcgaacatcaccaatgataaaaacatttatgacttcctgaactcctatgataaagcgataaccaacgatccgcgtacgccgcaacagatgattgacgaagcggtgaaaactgccgacaaggccgacgtggtggttgccgtggttggggagtctcagggaatgtctagcgaggcctcaagccgcacggaaatcgatatctcacaggcacagatagacttgctcaaggcccttaaggcgaccggtaaaccgctggttctggtattgatgaatggtcgtccattaaccttaagctgggaaaacgacatctcaaatgcgatgttagaaacctggtatagcggcacagaaggcgggcatgccatcgccgacgttctgtttggcgactataatccatcgggcaaactgccgatgaccttcccacgcgccgtcggacaaattcctatttataacagcatgctaaatactggtcgtccgtttaatccgcagaagccagacaaatatacttcccgttatttcgatattcccaatggcccgcttttcccgtttggctatggcctgagttacaccgatttcagcgtttcaaacgtcagcctttcgtcaaccacgctgtctaaaacgggggaaatcagggccagcgtcacggtgaagaatactggtaaagtagcaggagcaacgacagttcaactctatattcgcgacgtcacagcttcgataagtcgtcctgttaaagaactgaaaggttttgagaaaatcgatttacagccgggtgaagaaaaacgtgtcacctttacgcttcgcgagaaggatcttcgcttcttcgacaaccagctaaaatgggcgtcggagccagggaaatttaacgtatttatcggcctggattcggtaaatgttaaagaaaacagcttccagcttaagtaataggcccagctaacgttcaccgcctcccgacaaattgtgtcgggaggcgacgcacctttaaccgccgttcgacaataatttatgacccctatcacaatcattgcagcctcagtttgaaagccacgcaccacgcgttagatttaacttcatctcatccgaccacttgtgtgaattaatcaaatttacggcggtagcggaatttcttgatggagtacgttatgaataatcaatccgttccctatccccatctttttgctcctctcgatctgggttttacccagctcaaaaatcgcgttctgatgggttcgatgcataccgggcttgaggagatggaaaacggcccagagcggcttgcggccttttatgccgaacgcgcggcagcgggccttatagtcaccggagggatagccccaacgtgcagggcgtggtgtatcagggcggatcggtgctcaacgacgtttcacagattgcccatcaccagacggtaaccgaagcagtgcatgccgcgggcgggaaaattgccctgcaaattctccacgccgggcgctacagctaccaacctaccctcgtcgctccttcggcaatacaggctcctatcaatcgcttttcaccccatgctcttagcgaagaagagatagaacagaccctcgacgactttgctcactgcgccagtcttgcccaacaggcaggctatgatggtgtggaggtcatggggtcagagggctatctgattaatgaatttttaaccgcacgcaccaatcagcgcaacgacgcgtggggcggcagcttcgagaagcggatgcgcttcgccattgaagcggtgagccgcgttcgcgcggcctgcggctcggacttcattattatctatcgtctgtcgatgctcgacctggttgaagacggctcaagctggcaagaaacagaacagctggcagtagaaatcgagcgtgctggtgccacccttatcaacactggaattggttggcatgaggcgcgtgtcccgaccatcgccacccgcgtcccacgtgcaggctttagctgggtgacgcaacggctgatgggtaaggtcagcattccgctgattaccaccaaccgcatcaacgaccctcaggtcgcagagacattattggcacagggcgcggcagatatggtttcgatggcccgcccgttcctcgccgatgcagcctttatgcagaaagccgccgagggccgcgcggatgaaataaatacctgtatcggctgtaatcaggcctgcctcgatcagatttttgtcggtgagctgacctcctgtctggtcaacccgcgcgcctgccgcgaaactgagatgccgattatcgcaaccacacgacctaaacgtcttgccgtagtgggcgctgggccggcgggtctggctttcgccactacggcagctcagcgggggcatcacgtcacgctctttgacgcccagcaggagataggcggccaatttaatatcgccaaacagatccccggcaaagaggagttttaccagacgctgcgctatttcactcgtcagctcgaactgctcaaggtacagcagaggctcggcgaaagagtcgatgtccgtgcgctcgaagactatgacgaggtcgttctcgcctgcggaattttgccacgcctgccggacatcgagggtatcaaacatccaagcgtgctgacctatctcgacgttctgcgtgataaaaaaccggtcggtaaacgcgtagccatcatcggcgcgggggcattggatttgataccgccgaatacctcagccatgcggaatcctcatccagcctaaacgttgaggcattcaaccaagaatggggaatcgactcgagtcttcaacagcgcggcggattgtcggccagcggccctcactctttaccgtctgggcgagacatcacccttttacagcgcaaggccagcaaggtcggtgccggtctgggcaaaacgacaggctggatccatcgtgccagcctgttggcccgcggtgtgcagatgatgaacggcgtaacctaccaacgtattgacgagcgagggttacactttacgcgtgagggagaggcttactgtctggaagtggataacgtgattatttgcgcgggtcaggagccgcagcgcagccttgctgaacccttgcttgtagcaggaaaagtcgtgcatctgattggggggcggatatcgcggtagaactggatgcccgtcgcgcaatcgatcagggcacccgtttgggactcgcgatttaaccgttagtaaccggcgttggttttcaccgcacgcaggataacaaacttctggttagtggcgatggtggtacagttgccgaacaggcgacgcagtttctggtagtagtccagatgacggttgccaacgatacgcagctcgccacccggcagcaggcaacgcttggcgtcacagaacatgcgccacgcagtatcatcactgatgacggtgccctgatggaaaggcggattgcataacacggcgtgcagcgtctcgcgttctacgcctgacagcatgttattgacctcaaattcgcagcggtcgaggtcctgcggcagattattggcaacgttggcgcggctagattcgacggccatatatgactcatcgacaaacagcatttccgcttcagggttcagcgccagtgcggtaatgccgataacgccattgccgcagcccagatcggcgatgcgcccttcaataccttccggcaaatgctgcataaagaaacgggcaccgatgtccaggccggtacgcgagaacacgttggcgtggttggtgatacgcatttcgctatcatccagcgcccattcggtggtgaccggctcggcaggctgcatgtcgctttctggctgacagtggatcagacgcgctttcttccaggcaaggctggtgcgggtcgggccaaggatcttttcaaacagttgcagcgtggaggtgtgaatatcacgcgctttcgcaccggcgataatctgcgtatccggcgtcaccacctcacgcagggcgcgtagctgttgctcaagcagtgccagcgttttaggaactttaatgacaaccagacccggtgcctgaggcagtggcgcaagactgctctgagtcgtgaccagagagtcgtccatgccgttcaaacgcaggttataacgcgttgaaagctcgctcataaaggaatcacccacgctcacgggtgagaactcatgcagcgcgcaggccagagtgccaaagctgtcgttgaaaatcagcacgggacggccattgagtgtgtcggtggtcagggtttgcagcaaatactcatctgccgcttcccatgcctgcaacgtggtggattcttcctgtagcggataacgcaccagttctagttgcagtgtacccagttcaaaatggctcattggccctcctcataattcaatttgcgctgtttatcccttaaattgcgctatcagtaaaatgttttttcagttaaaaagggattatctgtcaccccttgctgcccgcgggtcattcacgggtagattgcttgcgggtttttccttcattaaagagagccaaagcaaacagttatgccagaattgacctatctgcaaggataccccgaacacctcaaggcgcaggtgaaccagctgatcgagcaaaagcgtctcggcagcgtgttgctcagccgctatcctgaaccgcatgatctgaccaatgataaagccctctatcaatatacgctggatttaaagaatcaatatttgcgcagctcttctccgctgagcaaagtcgcgtatgacaataagatccacgttatgcgtcacgcgttagggctgcacacggcgatttctcgcattcagggcggcaagctgaaagccaaggcggaaatccgcgtcgcgacggtattcaaaagtgccccgaggcatttttgcgcatgatagtggttcacgaactcgcacatctgaaagaaaaagaacacaacaaggcgttttatagcctgtgctgccacatgacgcccgattatcatcagcttgagtttgatacccgaatgtatctcacgcatcttgatctctttggcaaactgtatgtgtagcaataggatttcctcatatctttctcagctatttctcatattttcctcaggtaaataataagggagtaaaacatgattcgctttgccgtggtgggcactaactggataaccaaaagctttatcgacgccgcacacgaaagcggcaagctcaggctgacagcggtttattcacgcacgctggaaggcgccaaagcgctaggtcacgactaccctgttgaacactattttgactcattggaagcgctagcggcctccgatgagattgatgcggtttatatcgcaagccctaactcgctgcactgcgagcaaactttgctgtttctcaatcataagaaacacgtcatttgcgagaagccgttgtcctcaacgctgaaagaagccgagcaggtaattcgctgtgccaccgagaatggcgtagtgctgtttgaagctttcaaaaccgcttatctgcccaacttcctgcatatgaaaagcacgctgggaagaatggggccgctgcgtaaggttatcctgaattactgtcagtattcatcacgttaccagcgctatctggccggtgagaatcccaatacatttaacccggcattctccaacggctcgattatggacatcggctattactgtctcgctagtaccgtggccctgtttggtgaacctgcctctgtttacgccagcgccaccttgcttgaaagcggcgtcgatgcgcagggaaccgtgctgatgcgctacaaaaataccgagtacggggatttcgaggtggtcattaaccactccaaggtcagcgactcctggctgccaagcgagattcagggtgaagaaggcacgctacagattgaaaaactttctgagtgccagaccctgagctatacgccacgcggtgggcagaagctggatctcactcagccacagcatattaacagcatgctttacgaggcagagaccttcgccacgctggtagagagccagttctacggccatccaggtctcgaagtgtcgcgtatcacggccaaattattaaccgaaatccgtcgccagaccggtgtgcactttcctgccgatgacaaaatttaaggagttagcatgagtcaatccccgctgaaaccgttgcttattctgcaaaccggtcaagcccccgatcccatccgcgccgtgcacggtaattttccgcagatgtttatccgccagggcaatatcgatacccagcaggtcgtgattattgatttgcaggccggtgagcgcccccttccgccgcagcattacgcgggcgctgtaatcaccggttcacgcagcatggtgacagagcatctggactggagtgaggatgcagccgactggatccgccaggcaatgcttatcgatttaccgatgcttggtgcctgctatggccaccaattgatggcttatgcgctcggcggaacggtggattatcacccgcagggtatcgaggtcgggaccgaagaaatcgagctgctgccggcaggggaaaaagatgcgttggtgtcttcattaccttctcgcttcaacgccaacctaattcatctgcaaaccgtgctgacgccaccaacctgcgccaaggttctggcacgatcctctcacgatccacaccagatcctgcgctatgggcctaacgcctttagcacgcagttccacccggagtttagcgcggcaataatgaagacctacctgccgtggcttgaccaacaggcgccagatgacagcgtggattacgctgcgaagctgcaaaaggtcagcgatacgccgctgagtcaggggctgctgctcgccttcgtcgagtcactgggtaagcagcgcgcgatggcaggataagtacggaaatgtttcagcgttattgacattagaaacatttagaattattttcgtagtgcaaaggggagtaacttccaggtcggttaatcgtcattacggtggagacacccggttaccgagcaaccttttattcaggcttcagatcaatatctggcatgctgaatgaattgggttgtaagtgagaccttgccggaaggcgaggtttgcttatagctcaataagagcggctaacgtcttctgacgttggccgtttttgctttttagagggttgcatgatgatgaattccgtaggaaatcccgtactgtggggatcgtttgccgtcgtggtagtgataatgctggcggtggatatgctgctgcaaggccgtaaaggtgcgcagagcatgacaatgaaaagcgctgcactctggtcgctgctgtgggtcggattgtcgctgctgtttaactttggtttttggtggtatctcaacggcgagtttggccgcgaggtggcagacaaacaggccttagctttcctgacgggctatctcatcgagaaagccctggcggttgataacgtcttcgtctggctgatgctattcagctatttcagcgtccctgccagtctacagcgccgcgtgctggtctacggcgtgttaggtgccatcgtcctgcgtaccggcatgatcttcgcgggcagttggctggtggcagaattcagctggatcctctacctgttcggcgcatttctgctgttcaccgggattaaaatggccattgccaaagaggacgacggcgcgattggcgataagccactagtccgctggctgcgcggacatttgcgtatgaccgacgagctctccggggagaagttcttcatccgccgcaatggcctgctttatgccacgccgctggtcctggtgcttatcatggtggaactcagcgacgtcatttttgccgtcgacagcattccggctatttttgcggtcaccaccgatccgttcatcgtgctgacctctaacctgtttgccattctcggcctgcgcgccatgtacttcctgctggcaaacgtagctgaacgcttttcgatgcttaaatatggcttggcggtgatccttatcttcatcggcgcgaagatgctgttgctcgacgttatccacattcccgtaggaatctcgttaggcgtggttgccagcatactggccctgacgcttattattaatgcctgggtcaacgccagaaaggataaagcttaattttgtaaaaagtgaggtcgcttaaaacaagcggccttatattcttgttattaaaaaactctcaccatcacagagggtgaaatcatcgataagtgagagtttaaaaaaccctttttgattaggatcgtaaagttgctactatttttcaaaagggaataacatgttaaaaatatccattatttctacggcttgggcacttgccaaaattaataatttgaaaacgatgccgactcatgcaaaagttaaaaacatcataaaaaatatcaatagcgttgataacaaaataagtcgactatttggggttaccagcaacgctgcacttaacactccagagaaaaaaatcactgcactacaaaaacttgaagataagataaaagcaattaataaaagtaaagaatctccaatcgacattgaaaatagaataaaaaaaataaaagatgcgatcgcgcattatcaaactaaggctattagtgtaaaagatggtagtttgcaaaaaaaaatcccaacgaactttactgcctatgacactaaaagctttgtcgctctggctcatgaagataaatttcagcctaaaaaaaacatctcattagatagttctaaagaattcaaccctttaaaaaatgaacagcttacagttaaaacattggctaagctcgatgcgtcaagtatgaggttattttccttatcccctcagccttcgaatatttctgctcaaagtactctacttgaaaagtataatagtgttatcttatcaaactccgttgccatggataatgatgctgtttatcagggaatttccggcaataacacttataatcgtttttacgagattattcctgacaataacaatagcgagtcaaaaatcggaaagatagaggatgatatctatgatgataatgctatctatgacggtaatacaatctatgatgatatagccacaaccgctaccgatcatatctatcaatcgcttaatgaactgggttttattcagctctacaattctagtgaagataagaataaagacagcaaggcttaatgtttaatcttataaatataaagataacgatctaggctgtgatggtcgtgactttttcacgccaaactaagcggtttatgatagtttaagcacttaatattgataaatataacgggaacgagagttataatttaaagaggataaaatgaatatttcatcattcttaaaatttagagcaccttcaaaagttttattcgatagaatatcggagagccaaaagccatcaactaaagatataaaatgttttataaaaaatatcagcggtgtgaataactcattcagccgttttcttcacatcggtagatccggtgaagacttcaaaagtcacaatcagacttgtgatatcctggaaaaactctataagaatggttttaaggaaaaaggaagtaacatatcaaatgtatttagtaaaaaacagagaaacataatcaataaagcaagatgcaaatctttttataaatcactgaagcataacgaaatcataccagtcattgaaaataccaaagaagatattaatcattttaaagctaactatgtgacagtctaccctcccaatgacaatatttatactaaagcacaaatggcattacagtatgcaaaaatggatgctcttgacgttaatgaaacacttgcatctatcgaaaacgagttagtaggacaaggttataccgtgaggtatgataaagccttcgagaatgaagatttcaacgtgggaaaaaattttcttcgggcctcaaataatagcaacacgctaggaattttttctgtcatacgtcaagactacgttatcaccgaacccaagacggtggtgcctgtggtcgaaaaacctcttcatccctatcaagaaagcgttcgcggtaaaaatgacgaaaactaccggaaaaaattaaatgcgttaatttatggaagaatgagtcaggtgaattactctgatacgccacgaattgcgggcggcattattgatacgccggataaatcacccatcctccgttatggaaattctaaactcgtagaaggagaaatatactacgactctaaaaatcgcccctgtttttacatctagaaatttcatcaacgagtaatatcccaccataaaattcgggttaaccctatcaataatcacttaagcgattattgatagaacctaaaatcatcctacgctagcatcgcagaatggtctgcattatattaagggttatgaaatgacaagcgctatcgcaggcatggagtctcgctctattgacttaatcaataagataaaaaacaatccatccacgagaaatattaaaaatttcataaagaatgttactgcgattaaaaataactttggtcatttgtttggagttataaaaataaaaaataactttgttaatcacagtaaaacctactctgatttactcgaacttagacacctacaggttaactttagcgaacgaaagatagcgatgataaacaagcagatcgctaactcactgaataataccattcaatctccttataatcttcgcatcaacgagaaaattataatgaaaaacggcaatgaaaaaataaataaaatattcgaccgaatatataacagtaacgactttaacaaacttccgctttacgatgagcgtgaaaaatatatggcagccaacaactttattatgaaacaagaattaggaaagttgaccgttgaacctataatttcagccttcaaaaaaattcaaacgcttactcaaccttttagcagggaggtgaagaagaaagcggggatagccattgccaaatctgtagaaaagaaatactccatcgatgagaccattgcggaaataaaaaaaacgttatttcctcgtcaagctaacatacagtttattgctaatcgacctgatgctggtttttctcatccggactatcctccagtgaatgatgagatctgcggatttttcgatattacccagcgcctgccgcaggttaatgctaagacatcagctattttatcggaaaactcactgaaatcgatcaaacaaaaaattgaagaactttcattcaaaaagttcgttgaggatcatcctacccatgccgaaaaaacacgttatgctgacaactattcttatgagaaaaaagaataccgtcaatttcacgagaaaatagcatcagagtcagaagagtctggctatgcacatagtgatgatgaatacatctatgacaagatagatgattatcaaattgatgccctcacctatgaaacgaatcctcagcagccaaaggcattaaacggtgcttccgccattgttaactatcaaaaactgctagctgatgctgatgcaaaaatcgaaaagataaagcgtgatatatttaaaataaacaaagcagatacccaaagcttgtcgaacccccttgatgcacagatagatcaacttaacacagcaaaaaaccgactcagccaactcgcccgacttaagagacaagcgccactccctccgataatcgacatcggatttaacgacccatcagccacttcaagacatgcgtgatgacactgactgcgataattaaaaaatatttaatataaaaataacttttaaatttggtggccgccatgacctgtcgactacgttctcacaatcgtataaatatcatctcgcttaatgtaacaacggataacccagtacaaaaagcctaaggcgcctttattctgaacttgaaagggataaaaatcgtatcgggacatttatgagcaattggaaacacagcagtctcacacctgaacctgccgctaaagcccctctcgatagggcgcacttcccgctttgccaggcaagccagcgaggggctattcaaaatatcactgagaaaatgcaagggtctccgacaggggcaagaaaagcctcagcggatttaaaacaggcgccaggaaccgaccagtatcgtaaacacgccatcacagcccttagactctcaaagcagcccaacctcactattaatcagtctgttgaaaagattaaagaggtcttggctaacggcattaccggcattagggtcgactttatttctcaacacaccccaagcgcataccgactctaaaccgacggcgttgagatgaatcagagttatttttcgatggttgctgaataaccccaacctacagggcgacgctaaactcatgagccaggccacagtctggctgaacgaacagcgttttaatctctaccggtggtagcataaaacgcgttgccagtgcgcgataaggcgtctaattttatagccttaacgcgcagcaaggcgttcatacaacttatgcaaggtggctcatggcacaacataaaatcattctcgactgcgatcccggcattgatgacgcggtggctattttgctggctctagcctcgccagaagagattgaactggtcggtatcacgacggtttcaggcaacgtttcgctcgaaagaacctcctataatgcgcgtcgcatttgtacccttgcgggccgagaagacatcccggtctatgccggatgcacacgcccaatgcttgaagccgagtgcatccataccacggttcacggtaatgacgggcttgggaacgtgaagctgcctcagcctgcctttagcctggaacctcagcacgccgtcgacttcatcatccataccctgcacgccgaaccgggccaaatcacgctctgccctatcggcccgatgaccaacattgcgctggcgattatcaaagacccgaccattgttccgaagataaaacggctggtatttatgggcggtgcggctttctgtccgggcaatgtctccccgactgctgaattcaatatctacgttgacccttgggccgcacacgtggtgctgagcgcgggtattcctcaggtgatgtttggccttgatgtcaccctgcaagccaagataaacgccccttatcttgatgccctagagcaggtgaatcctttactgaagaccgcaacggccatgctgcgcaactatggggttagcgatccttgcctgcacgacccttgcgtcattgcctggcttatcgaccctagcctgtttacaggcatagcgggaaaaatcagcgtgagctatcaggatgaccagcaccgaggtcagacgctggttgccgttaagcctcgtcacctcgacgatgattcaaccaatattgatgttatgaccgaagtcgataatcctcgcctgctggagatgctggccgagcgcttaagtcgcctgtaaaaaaagcccccgcagttggctaaccgtggggctttgttacatcaaaattttactgccagccgtaacgacgcacaaaccagcctttaacgccctgggtcatcaccatgtaggccgccagaatcacaatcagccatgggaagtagctgagcggcagtgcctgaagttgcaggaacccggccaccggcgagaagataatcccgataccggtaatcactaccagcagcgtcatgatacacagtggcaacgaagcccggctttgaataaatggcactttacgggtgcggatcatatgtacaatcagcgtctgcgacagcaggccttcgatgaaccagccggactggaatagagtctgcatctcaggcgtattcgccttgaacacccaccacatcagcgagaaggtgagaatatcaaacactgagctgataggaccgaagaacaccataaaacgcccaatatcgccggcgttccagcgctggggtttagacagttgctcctcgtcgacgttatcgaaaggaatagcaacctgcgacacatcataaatcaggttctgcaccagcagatgcaacggcagcataggcaggaacggcaggaaggcgctcgcaaccaatacgctgaaaacattaccgaagtttgagctggcggtcatcttgatgtacttaagcatgttggcaaaagtgcgacgcccttctgtcacgccctgctctaacaccatcaggcttttttccagcaggatgatatcggccgcctctttggcgatatcgacggcagaatcaaccgaaatgccgatgtcagcggcacgcagcgcgggagcatcgttaatgccatctcccataaagccgaccacgtgcccttgctcacgcagtacgcgcacaatacgctccttgtgcagcggtgccagcttggcaaatacgcgagtatttcttgccacctcagccagctcagcgtcactcaatttctcaacgtcgctgccagtcaaaatattgtcaacttcaagccctacgtccttacagacttttctcgcgaccagcgggttgtcaccggtcaggatcttgacggtcacacctttacgctgcaaggcttttaaagccggtgccgtactctcttttggtggatcgaggaacgcgatgtaaccggcaaggatcaggctcgattcatccgctaccgcgtaatcgtgggtgcgtgcaggtatgactttatgcgcgaccgcaaccacccgcagaccctgctgattaaggtcatccgtgataccgcgaatacggctcagcagctgcgcggtcaaggggacagtttcatcgttgagctttaccagcgtacaaatcgacaggatctcttccagcgcgcctttacagatcaaacgatgataatcagcagcctctgacaccaccacagacatacggcgacggtcaaagtcgaacggaatctcgtcgattttgatatagcgattctgtctctgttccatttcaaccgcctcagcgccctcaagcactgcgacatcgagcaggttcttcaacccagtttgataatggctgttgagccacgccagatgcagcacatcattacatggcgtacccaatacgtcggtatggcgctcaagaatgattttgtcctgcgtcagggtgccggttttgtcggtgcacagaatatccatcgcaccaaagttctgaatggcatccagatgtttaacaatgactttttgacgagaaagtttgacggctccctttgccagcgtcgaggtgacaatcatcggcagcatctctggcgtcagacctacggccaccgacagcgagaataacgccgcctcccaccagtcacccttggtatagccgttgatcagcagcaccactggcgtcatcaccatcataaagcggatcagcagccagctgactttgctgatgccgcgctggaaggcgttcggctggtcgtcttgcttcatgacgcgctcggcaagctgaccaaaccaggtctgcgcaccggtagagataaccattgccaacgccgtaccgctgataacgttggtgcccataaagcacagcgtatcctgctcaagaggatcgcagtcaaccggcatgcggctattggcctgcttctcaacgggcagcgactctccggtcaacgccgcctggctgatgaacaggtctttggcggacaggatacgcaggtcggccgggatcatatcgcccgcagagagtttcactaggtcgccgggaacaagctgattgataggtaattcaacggtgcggctttgcccggtttgagtatcgctgcgaagcacggtagccgtattgctgaccatggcctttagcgcatcggcggctttattggagcgcgcctcctgaacaaagcgcatcagggtagagataaccaccatactgccaatgaccagcgtggccttcatatcttcagtggcgtatgaaactgctgccagaatcgtcagcagaaggttgaacgggttgcgatagcaaatccacaggtgttgccaccacggcatcggttgctggtcgttggtctgattcgggccaacgcgttcacgaatggcctccgcttcaagctctgtcagcccctcgaaatggctgttgaattgggcgtaaagctgctcggcactggcgcgcgcgcagtgttggcaatgttgaacaatagaaggcggcaaatctttgccgccgtttggctgggcattttccagcatcggagaacggcggataagacgtagcggcaaagtacggctgaacacgtggatcagtcgttgagtcatagttttaaacatagctcttacctttcttgcgcccacgacaaaatcaccgtgggcatggcaaagggtgtaaaaaacagagcatgcaatcagagagagcaggctgctgcttaccaaatgttgtccggtaagccgcagcgaaaaggcaggtgcttaccggatcaagacggacttactgcgtcggggtcgggatccataaaatttttctcggtaggttaataaacggcgatgcggattgtcgcgcaaacgccgcgaactgaactgatctcaatcaattaagtgcgcgaatcatactcctgataacattaaccatatctaaaccatcactaaaccttccttaaaccctctaaagcaccctcgcggtcgcccggcctgtcgccttgccttcaccgcaatgcgtaggttttatccacagatcgaaaaagctttaactctgtgcgaagtaaatcgacaggacttgcagcagattgaagcgctctcagcagcagatttccgataacaaatttccttgtctcaagtcaaaaaatgccccattaagcccgggaataaatctatatgtagcgtgtatattgtcgttattaatctatatatagcgttttaatcgaagggacttctattttgaaacttgagaactcaggcctgctggtcatcaagcgcgatggctgtcaggtgctgtttgacgggcagttgatcatgcaggcggtgcaacgtgcggcggccgccgttaacgtcgacgatatggcatattgcacccgcgtggcgagtgaggtgacagagactctgcgcggtaaacatcgcatcgacatccatgagattcaggaagcggttgaaaaccagctgatggcaggcccctataagccgctggcgcgcgcctacatcgagtatcgccacgaccgggacatcaaacgtgaattgcgcagccgtctcaatcaggagatccgtggactggtggagcaaagtaatctcgcgttgcttaatgaaaacgccaataaggacagcaaagtcattcccacacagcgcgacctgctggcggggattgtggcgaaacactatgcgcgtcagcatattctgcctcgtgacgtggtgctggcccacgagcgcggcgaaattcattatcacgatctcgactactcaccgtttttcccgatgttcaactgcatgctcatcgacctcaaaggcatgttgaataaaggttttaaaatgggcaacgcggaaatcgatacgccgaagtccatctccaccgcgaccgccgtcacggcacagattatcgctcaggttgccagccacatttacggcggaaccaccatcaaccgtatcgacgaaattctagcgccctttgtcacgcaaagttttgagaagcatagaaaaacggcaacgcagtgggctatttccgacgttgaagcctacgcccaccagctcacagaaaaagagtgctacgacgcctttcagtcgctggaatatgaggttaatacgcttcacaccgccaacggccagacgccgtttgtgacctttggctttggtctgggtacctgttggcaagcgcggctgattcaaaaatcgattctgcgcaaccgtatcgccggattaggaaaaaatcgtaaaacggccgtgtttcccaaactggttttcgccattcgcgacggcataaatcataaggcggccgacgccaattatgacatcaaacagctcgccctcgaatgcgccagcaagcgtatgtatcctgatattcttaattacgatcaggtggttaaggtcaccggttcgtttaaaaccccgatgggctgccgcagctttctcggcgtttaccaggagcacggcgaagaggttcatgacgggcgcaacaacattggcgtgataagcctgaacctgccgcgcatcgcgctggaagccaaaggcaatgaacctgccttttgggatttactcgaccagcgtctgctgctggccaaaaaagcgttgatgacccgtatcgcccgactcgacggggtaaaagcccgcgtcgcgccgatcctttatatggagggtgcctgcggcgtgcgcttgaaagccgatgatgacatcagcgaaatcttcaaaaacgggcgggcctccatctcgctgggttatatcggcgtgcacgaaactatcactgcgctgtatggcggccaagcgcatctgtttgataacgctgcactgcgcgacaaagccgtgtcaattgttgcccgactgaaggcggccaccgaggcctggaagcaggaaaccggctacggcttcagcctctacagtacgccgagcgaaaacctgtgcgatcggttctgccgactcgataccgcagaattcggcatgatcccaggcgtgaccgacaaaggctattacaccaacagcttccacctcgacgtagagaagaaggtcaatccgtatgagaagctggatttcgaggcgccttatcccccggtcagcaacggcggattcatctgctacggcgaataccccaacctgcagcacaacctgcgcgcgctcgaggacgtttgggactacagctatacccgcgtcccctattacggcacgaatacgccaatagacgaatgctacgattgcggttttaccggcgagttttcctgtaccagcaaaggatttacctgtccgaaatgcggcaatcacgatgcctcgagggtgtcggtcacacgtcgggtgtgcggctatctcggcagcccggatgcacgtcctttcaacgccggtaagcaggaagaggttaagcgccgcgtaaagcatctcgataatgggcagctcggttaatcgcatgaactatcacgcctattatccgctagacgtcgtcaacgggccgggcacccgttgtacgctgtttgtctctgggtgcgtgcatcagtgccgtgactgttataacaagagcacctggcgactcacctcaggccagcttttcacgcccgagatagaagaccgcatagtcactgatttacaggataaggtcatcccgcgtcagggtctgtcgctctcgggcggggatccgctgcatccgcaaaatctgtcggctgtcgaccatcttttgcagcgcataagcgacgagtgtccgggaaaaaacgtttggatgtggaccggttatcgcctcgacgagctcagcggcgatcagcggcggacgatcgctcgagtcaacgtgcttgtcgacgggaaatttgtgcaggatctgcacgatccttcccttgtctggcgcggtagcagcaaccaggtgatccactttttacgttaaaactgccgcttaaaatcgttgaggatggacgaaagatccattctcttcagcctaacgatcgctgcatcaacgacttggctatttattcccgtcgccgtcccgcattgttcatcaacctgcaactcctgcttcaccgaactgtcattttccccctccaagatggtgccaacgtcgaaccgaggttgacaccatgcaaatttttgactcaatcagacagtctttacatcacccccgcggtcgcccggcagagcacgtttctgctcctgacctacgcgctgacattcaggcagcgaggtattcattgtgatagacctatctagacatccgaccagttacccaacacgttaccagcagatagccgctcagctcgagcaggagctgcgtagcacttaccgctgcggtgactatctgcctccggaaaaccagctcgccgaacgttttcaggttaaccgccatacgctgcggcgtgcggtcgatgaactggtcgatcgcggctggcttcagcgccgtcagggtatcggcacactggtgttgatgcgcccttatgattatccgctgcactcgcaggcacgcttcagccaaaacctgctggatcagggaagtcatcccaccagcgaaaggctgttggcggtgctccgtccggcgaccgatcacgttgcgaccgccctggggcgtcaggagggtgaaacggttattcatctgcgcactctgcgtcgcgttaacaatgtgcctgtctgcgtgattgaccactacctgccagatctcggctggtggcccatcctccagaatttccaaaacggttcgctgcatgactttatccgcaccgaaatcaatcagcgtctgagccgccgcacgacacgtatcaatgcccgccgcgcgcaggccaaagaaagcaaactgctggaaattgtcccgcaggcaccgctgctttgcgtgcgcaccattaacacctgtgacagcaacggcagcgtagcggaatactccgtcagcctgacgcgtgctgacatgattgaactcaccatggagcactaatggacgccttagaaaaccgtcaacgctggatgtcggtgctggcccacagccagccgtcggagctgcttgaacactggaagccgctcaatctcagccctacctttgaacgcctgcgcccggctgaaaccggcctgacgcagctacaggcccggatgggcggcaccggaaaacgcttcgtgatgggcgacatgaccgtcacccgcgccgttatccagcttgcctccggcgtctacggctacagctatgttcgcggtcgcgacaaggcccacgccgagctctgcgccgtgattgatgcgctgctacaggtctccggtatggaggagctgctccataaacgcgtcattgcgccactggccgccagccagcaggcgcgtcgcgaacagcgtgcccgcgaaattgcgtccagccgcgtcgacttcttcactctggttaggggagagtaactatgtcactcgttgcaagttttaagcatccggtcgccgatgcccagtttagtttccgtcgtatcctcaaagcgttaagcgaacccggctcgattgtcgcgctgccggaaatgtccggcttcggcgtgctggattctgccagcgcctgcgtgctgctgacgcttatcgatcaagatacgccgctgtggataagcccacggctcaacgacgacgtgctgcgtcagaatttgcgattccacaccggtgccgtactgaccgaagacccgagcagcgttagctttgcgctggcggagggttcgctcgacagcgccacgctgttggccttcccgtgcggtgatgaaatgtcgcctgagctggccaccagcgtcatcgtgcaggttgagtcgctggaaggcggcaagccgctgcgcttgctgggcccggggattgaacagtcacgcgttatctcggtgcagctgcccgacgccgtcacccaatatttactcaatcgtccacaccgcttcccgctggggctggactttatgtttacctgcggtgagcagctgcttgccttgccgcgcacgacccgcgtggaggcctgctaatgtacgttgccgttaaagggggcgagaaggccatcgaggccgctcacgaactgctggcacaccagcgccgcggtgacactcaggtcactgaaatcaacgccgaacaaattgagcaacagcttggcttggccgtcgatcgcgtcatgagcgagggcggaatttacgatccccagttggccgcactggctattaaacagtcgtcaggggatctggttgaggccatcttcctgctgcgcgcctaccgcaccacgctgccgcgtctggccatcagtcagccgctgaataccgccaatatgcgcctcgaacgccgcgtatcggcgatttataaagacctgccgggcggacaagtgctaggcccgacctatgactacacccaccgcctgctggacttcgctctgctggccgaaggattggatcccgtcgcccccaacgccgacgagacgctccccgaatcctgcggacacgtgtttgacctgttggccaatcaacagttggcggtcactgagcaagacgacggcagcgagccggacgacattacccgcacgccgcctgtctatccggccacccgcgccgcacgtttgcagcagttggtgcgcggcgacgaaggttttctgctgtcgctgagttattccacccagcgtggctatggccgcacccaccctttcgccggcgaaattcgcaccggctggctgacggtcgaaatcgtgccggaagagctgggctttgctatcgatatcggcgagatcctgctgacagaatgcgagatggtgaacggctttattaccccagaagatcgaccaccgcacttcacccgtgggtatgggctggtgtttggccgcgccgaacgcaaggccatgtcgatgtcgctggttgaccgcgcactacaggcccccgaatacgatgagcaggtccgcagcccggcgcaggatgaagagtttgtgctgtcccacgccgataacgtcgaggccgcagggtttgtctcgcacctgaagctccctcactacgtcgatttccaggctgaactggagctgttgcagcgcctgcgcaaacagcacgaagcggccaatggcaaggatctctccaatgaaaaataataatgctgcaaccgcaaccggctataaccagggttatctagacgagcaaaccaagcgcatgatccgccgagctattttgaaggccgtggcgatccccggctatcaggtgccgttcgccggtcgtgagatgccgatgccttacggctggggcaccggcggtattcagattactgccagcgtgataggtcaggaggacgtgctgaaggtcatcgatcaggggccgacgataccaccaacgccgtgtcgatccgccgtttctttaaaaatgtcgccggcgtcgagacgaccgaaaaaaccaccgaggcgacgcttatccagacccgccaccgaattcctgaaacaccgctgcaggaagatcagatcctgatttttcaggtgccgatccccgagccgttgcgctttatcgagccgcgtgaaaccgagacgcgaaaaatgcatgcgcttgaagagtacggcgttatgcaggtgaagctttatgaagacatcgcccgcttcggccacatcgcgaccacctatgcctatccggtgaaggtcaacaatcgctacgtgatggatccgtcacctattccgaaattcgacaacccgaagatgcacatgatgcccgccctgcaactgttcggcgcgggacgcgaaaaacgtatctacgcgctgccgccgtttacccaggtcgaaagcctggactttgaggatcaccccttcacggtgcagcaatgggatcagccgtgcgctctctgcggatcgcacgacagctatctcgatgaagtggtgctcgacgatctcggcaaccgcatgttcgtctgctctgacaccgactactgcgctcagcagctcgacaccgcatctttaaaagaggccaataaacaatgaatccggtcaacgcttctgccacgccgctgctttccgttgagaacctgacccacctttatgcgccgggaaaaggcttcagcgacgtgtcgtttcagctctatcccggcgaagtgctgggcattgtcggcgagtccggctcgggtaaaaccacgctgttacagagcatctccgcgcgcctggcccctcagcagggtcaggtgatttacaacaacggcgtgcagcacgcgcagtcgctttatcagatgccggaaagcgatcgtcgtcgcctgctgcgtaccgactggggcgtagttcaccagcatccgatggacggcctgcgtcgccaggtgtctgccggaggcaatatcggcgaacgcctgatggctatcggtgaacgcaactatgcccgcattcgtcaggaagccggcaagtggctggaagacgtcgagatcccgatttcacgcctcgatgacctgccgaccaccttctcgggcggtatgcaacagcgtttgcaaatcgcccgcaatctagtgacccatcctcgtttggtgtttatggatgagccgaccggcgggctagacgtatccgtacaggcacgcctgctggacttgctgcgcacgctggtggtcgagatgcagctggcggtagtgattgtgacccacgacctgggcgtagcacgtctgctggcccaccgcctgctggtgatgaagcaaggccaggtcgtagaaagcgggttgaccgatcgggtgctcgatgacccacatcacccttatacccagctactcgtttcatccgttttatcctaggaaccccaagagagtgataacactatgacaaccagactccgggtcgaaaaattaagtaagactttcgtattacataaccagcaagggataaaactgccggtgtttcacaacgtcagcctcgaggttaacgcaggggaatgcgtggtgctgcacggccgttcgggcagcggaaaatcgactctcctgcgctcactctacggcaattatctgccggacagcggccatatctgggtgaaacatcaagagcagtgggtcgatatggttagcgcgcaggcccgagaaattctcgacgtgcgccgccacaccctgggctgggtcagccagttcctgcgcgtcattccgcgcatcagtgcgctgaatctggtgatgcagccgctggttgaattgggcattggcaaggcggaggccgagcaacgcgccggtgaactattgcagcatctgaacgtgccggagcgcctgtggcagctcgcaccgtcaaccttctcaggaggtgagcaacagcgagtcaatattgcacgcggctttatcgttgattatccggtgctgctgctcgacgaacctaccgcttcgctggatgcgaccaatcgtgcagcggtggtgacactgattgaaaaagccaaggcgcgcggtgccgccgtggtgggtattttccacgatgaagatgtgcgtgagcgcgtggctgaccggcttcacgtgatgacccagaacaggctaatgcggagaatttggcatgattatcaataacgtcaatctggttctgcccgaagaaaccgtcaggggatcgattgagatccaagagggcgtgattaggtcttttaccgataatccgagtcatctgccgcaggcgctcgacgctgaaggcggctggctgatgcccggttttgtcgagctgcataccgacaatctggataagtttttcacaccgcgtccgaaggttgactggccagcgcattcggcaatgagcagccatgatgcgctgatggtggcgagcgggataacgacagtgctcgacgccgttgcggtcggcgacgtgcgcgacggtggccatcggctcgagaatctgcaaaagatgatcgacgcagtgatcaacagccaacaggccggattgaaccgcgccgagcaccgcttgcatctgcgctgtgaactgccgcactcctccacgctgccgctgttcgaagagctgatgcacaagccgggcgtctcgctggtctcattgatggaccactcgccgggccagcgccaatttgcgacgccgcaaaagtatcgtgaatactatcagggaaaatatcagcttaacgacgagcagatggaagagtttcaggccgcgcaaatcgccaactcgctgcgttgggcacagccaaaccgcatggcgattgccgcgcactgccgcgagagaggtattgccctggcgagtcatgacgatgcgacggcagaacacgtcaatgaatccaaagcgttgggcagcgtgattgccgaattcccaaccaccgaagacgccgctcgggcctcgcacgcaaaaggactgcaagtgttgatgggggcgccaaatatcgtgcgcggcggctcgcattctggcaacgtggcggcaaaacatctggcgtcgctgggcctgcttgatattctttcttcagactattatcccgccagcctgatggacgcagtgttccgcatcgccaacgatgaggacaatgcctttagcctgtcgcaggcggtggcattggtcacgcgtaatccggcgaaagccttgggattgcaggacagaggagtgattgcagaaggtaagcgcgccgatctggtgttggcaagagcgcatgaccatcatcactatgtgcaaaacgtctggcgtcagggaatacaggtattctgatggctaagcttgtttacgtcatgggtgcatcgggatcgggcaaagacagcctgctggacgcactgcgaaataaaaccccgctcgggttgctggtggcacatcgctacattacccgcccggcgcacgccggtgcggagaatcacatcgcgctcagtctggatgagtttcagcagcgtaaggcccaccggctgttcgcactcgactggcaggcgcatcagactcactatgcgctcggggtcgagattgatctgtggatgcagcgtgggttcaccgtggtcgtgaacggttctcgggcgcacctggccgaggccgtggctcgctatggcgcggcgctgctgccggtttatctgcacgtttcgggcgaggtgctcgccgaacggctcgcgctgcgcggccgcgaaacgccgctggagattcagcagcgcctgcaacgtgctgccgagtatcagcacggcctgcctgccgaatgccgtcggctgaacaacgatggacgcctgcaagacactctggccgatctgctcacgctgcttaccgaacaggcggtctgcacctttccgcctccagaacaccccattgtctgcgcacaggataacgctttatgacgcttgcaaacgcaacgccgagtgacccgaaaataggcaacaacgtcgagctcaaacagactcgtttaggccagtacgtacatctgggcgacgacgcggtctttgaagaagtcgaggtcggtgattactcctataccgccggccataaccagattcactatgccacgataggtaaatttgtttcgattgccacctatgtgcgcatcaatccaggcaaccaccctacctatcagcgcatcgcccagcaccatttcacctatcgcagttcggcctatggattaggcgaagacgataacgacttctttaactggcgccgtgaacacgcagtcaccgtgggccatgatgtctggattggccataacgcggtgatcatgcccggggtcaccgtaggcaatggcgcggtcataggatcctcggcggtggtgaccaaagacgttgaacctttctcaatagtcgcgggcgtagcggccaaaaagatcggcatgcgttttgaagactcgctgatcgaaaggatcgagcgcagccagtggtggaactggagccatgagacgttgcaggagagaatgccagaattcagggatttggacagctttgtggagaagtatctgtaatcgcgcgatcctcgggggaaaatcaggcgtttttgcttatacattagcataaacaatagcgtcttttcctcctctcccgcccgagcgattgggcaaaaaatgcgtaatccctccgcttgaatgcgtatacataaaagctatacccccttccttttaagtcattttccaatcccctcctccccagataatgaaaaaaaagcgggaggaaccatgaagagaattattgttggggtaacgggcgccaccggcgcacctttggcggttcgcgtgctgcagtttctgcgcgaaatggaggtggaaatccatctgattgtctcgcagtgggcaaaaaccacgctccagcaggaatgcggcatgagctatcgcgatctctgtgccatggccgacgtggttcacgatccgcgcaatcagggtgcgaccgtgtcgagcggatcgtttcaggttgaaggcatggttatcgtgccgtgcagcatgaagacgctggccgctatccgcatgggctttgccgagaacctgattgcccgcgccgccgacgtgatgctgaaagaacgcagaacgctgttgatggtcacccgagagacgcctcttaactctatccacctagagaacatgctgcacctcagcaatatgggcgccgttatcttcccgccgactcccgctttctacaacaatcccgagtcaatttcgcaaattctggatcatctcgccgtaaggattctcgaccaatttcatctgtctcacccggcagccaaacgctgggaaggactgggtcataaggagtaataaccatgccattccatgatttacgcagttatcttgacgcgctcgacgaacagcagcagctgctgagaattgaagaacaggtaaaacctgaacccgatatctctgccgccgcctgcgctgccgcaaaactgggcgacaagtcaccggcgttattgttcgaaaatatccttggatatcatgacgcacgcattgccatgaacgtccacggatcctggccaaatttggcaatcgccatggacatgccgaaaaacaccccgctgaaacagcagtttttcgagtttgttcggcgctatcagaattatcccggtgaagttgagcatcgtgacagcgcgccgtggcaggaagtggtgattgaggacgacattaacctgttcgatatcctgccgctgttcagacttaaccacggtgacggcggcttctacatcgataaagccagcgtagtctcgcgtgacccttctctggaagggaaagaaaacgaagacagtcagaacgtaggcatctaccgcattgaagtcaaaggcaaaaaacaccttggtctgcaaccggtccccgcacatgacattgcgattcacctgcaacgcgccgaagagctgggcgtagacctgccgattgccatcactatcggcaacgacccgatgataagcaccgtcggtgctatgcccatcctttacaatcagtcggaatatgcgatggccggagcactcaacggcacgccatatcccattgtgaaaacagccttaaccgggctggacgtcccttggggttcagaattcgtactcgagggccgcattctttcccgtgttcgcgaagcagaaggtccgtttggtgaattcaccgggcactattccggtggccgtcagatgccggtcgtcgaaatcaccaaggtgtcacaccgtaaaaatccgctgttcgagcatctgtacctcggcatgccgtggaccgaaatcgactacatgatgggcatcaacacctgtgcaccgctttacgtgcagctgaaagaagcgttcccggaagtcgtcgcggtcaatgcgctttatacccacggactggtggtgattgtttccaccaagacgcgcttcggcggctttgcgaagggcgtgggtatgcgcgtgctgaccactccgcacggtttgggttacgccaagatggtgattgtggtggatgagactatcgaccccttcaacctgccgcaggtgatgtgggcaatgtcgaccaagtttaaccctgagtacgacctggtgacggtgcctgggctgtccattctgccgcttgatccggcttcacaacccgccggaatgaccagcaaagtgatcattgacgccactacgccaaaagcaccggaagaacacgggcacttctcgcaggagctgcgcgatcctattaccaccgatgactgggttgagaagctgcacaatatgatgcaggttaacagcctgtctcaggcaaaagactcctccaaggtcaacaacagctaaggaagccgcatgaaacaacatcctgaaatttgtccgcgctgtgaatccaatggcccggaggcgctgagtcattctccggtcgagggtgcctggacggtgttccattgcccaacctgtttcttcacctggcgcagtacggaaccggacttcattaccgatccgaagaagtacaacccaaactttaaattctctccggctgatatggcgaattttggcgtgatgccggccattcccgaattgaaaactaagggttaatgactaaggcgtaaaagccttaatgaccgttcgcagcatggtgctaaattcatggtgcgaacggtaaatcaacaccagatcgtcggcaacactctcaagttccggcacgggcagcgtcagcaggttgtcccactcactctcgccagacagcaccggcagcagtcctacgcccattccctgctcgaccagatatttcatcatcggcacatctgaggcatccgccaatacctgcggttttagccccgccttgctgaaaaactgcatcacgttgtcatataccccgaaacccgacttgcgacgcattagtatcagcggacaatcggcaagctgctcgagggtcacggttttatgctgtgccagagaagactcggggagacacatgacgcgaaagcacgaacgcgccagcggctgaatagacagctcttcatcgctggtggtaagcggcaggtgcaccaacgcgaggtcgatgcgccgccgttcaagcagctcctccaggtaaccggtatccccctgatgcaacgagaaggtcagctgcggatgttcagacttgagcagtttcaccaccgccgcaaccttcggaatgcccatcgaaaccgtgccaatgcgcaccacgccacgtgagccctcaccgaacgcctgcatctcttcatcgatttcagtcgcaagctgtaacaggtcgctggcgcgtcgatagagatacatgcctgcctcggtaggcgccatgccgcgactagacctatcaaacagctttacaccccactcgtcctcaagctgatgcagcgccttgctcaacggcggctgggcgatgaacaacacctctgaagctgccgagattgacccgtgttcaaagacggctttgaaataactcagcggcttcagtttgatcatatttccctcttccacatcagctttttaccaaagcctagcgtattgtctgtcatcttgatttcattcaactgtagctgccaaaccggcgctttcatggcgatggctaccgggaaatgtttgcagtagagcgcgcgaccgactttatcctcttccccttcaagcagcgtcgcggtaccgctgtactgaatgcctttgataagcgcgatagtcttaggctgggtggcaatagtgcccacgacctgagggtttttatgcatcagtgaaccatggcgtgtcttcagctcagtcatgaaatacaggcacatacgttcgacgtccgtcacataaaagcagttggcgctccagatgtcgccctccgcgtgagcacagagtgcaagcacgtggtttttgctaagataacgactaataagttttacatcatcgggatcgttcatacccgcctcctggcgaaaaattcgctctattttagcgcgatgaccggcaagtaacagtctgcgctgttgctaaacatgcgtttttgcttcacttattggtatggctgtgggttaatctgctgaatattttgtgacgaaccagagtagcttaattatcgtggaaagcctgcctcatactccgcccgccaatgactggtatctctatatactgcgtaccgcgacgggtatgctttataccggaataacgaccgacgtggcgcgccgtctgcaacagcatcaaaatggcaaggggcgaaatccctgcgtggaaaaggtgaactcaggttggtttttcactgcgtcgcgggcgatcgttcactggcttcaaagctggagtatcaggttaagcagttgagtaagaagcagaaagagcggctggtgcaggacggtccgcaaagcattaccgattatctggcgggctgaagtcatcataaaaaacggggcgcttgatgcgccccgtttcagtaacacgttgtctatcgatatcgattacagagcaaggttaaccatcacgccgccgataaacgcatctttaacctggctcactgcgcctggggcagaaacgtactgcaggttaggacggattgtcagccagtttgtcgcctgaataccgtagtacagttcgtagttaacttcagaaccgctctgcactggcagataggttgggttgttgtagttatcaacaccgttggcagcatcctgatcgcgctgagtcgcggtgtaatcactgttcacgtggatacggcctacgccaaagccaagctcgtctttaggacgtgagtcgaaaatccctttgtaggtgaccgcgacagactgatagttgtcagttttcgaggttttcttgtcgttcatcacgccttgtacggtcagcgtcaggccacgggtgttgtcaccagccaccgaggtcaactgttgctgcaccagcacatagccgccgtaagcgtgggcatcacggctgtactgttcgctaccgtttacgatagaaccgctgctgtaaacgtcacccttagtcgagctgtagtaagcacccagcgcgtatttacccggcagcttgtctggacccagcgttggtttccagcctacttcgaccgggatcaggttaccgattgaacctgaagtatccagacggaagccgttaccggtgtcatagtttttagggttctgattatagataccgacttcggtataaatttcaggggtaaagttcagcttgatgcgaccgccccactgggaaacaggccagttataccaacggtcaccgcgccagttacccgcctggccactacccagcgcaaggttctggaagttgctgtttagcgagtcgaagtcttcacccacggtcacacgaccggctttaacatcgagggtgtcgttgaagtatccttgacggatccagaactgggtcagacgcgtggtttgaccacggccccaaacttcctgagaagaagacagtgtgccggtacgcggatcgccaacggtgtcgttggagatgttgcgcccattacggttggtcagggtcatctggaattcggtgtctttccagttcaacaacttgtcgaggtcaagatcgaccccaagctgccactggtcggaatagcgtgcggtggtatgcttatcataaccgcccgagaagttgctgcctgtctcagacgtgtagtttgtttggaaatcaataccttgttctttcagagcagtacgttcaccgccccagtcaccaaacatccagggagagtcgggtgagaatggacccatatctgcggccaatacttgggcagagctaaaaagcagtccaacagaacaagccagatacaactttttaaaacgacggggggagtaattggccactttagattccttataattcttaaagttcagttttaaacttcagtaaagacaatattattccacgcagagtaatattctgtgacctgcatttgattatttaaaacaatataattaaatatgtaacacaacgttgagcgttattgctttaaataacaacagtttggattttttgtgctaaaactgctttaagactgcatttatttttacctttacgcagcgagttggaaacatatcctccgaatgtaactcactcattcgattaattatcacccatatctgcgcttacttaattctttatttttttacattccattagcaaataaagctattttttaaaattagcacgatttattcataaaaaaaggccgatgtatgaacatcagcctgtttgaaatagtgctcttagagcttaaatgacttttttcacttaattgtgattaaaatgaggaggatactccaccagcccgtttgcgccttcaagagcattgtcggccagcacataaagctggaacgcctcagcggagtcaggccagcggcagtgaagattaaactgcgctgcgggtttgaatccaaatcggccgtagtactcgggcgcaccgagcacgacaacggcggcgtaaccgaattcattgagcgaatccagcccttcgtataccagcttttcgcccaatccctgacggcgcagagattcctctaccgccagcggtcccagcccaacccattggcggtcttcaccctgtacgtcgaccggggtgaatgcggcataacctacgaccccccttcatcatccgttgccacgacgcccagcgtcagcaggccgtcttcacgtagacgctgcaccaaatcggcctcgtcatcacgcccaaaagccttgcgcaggaggttatcgatgcccgcagcatcgaccgggatttcaactctaattaacatgatgatactgccggagagcctaactcaccgtcctcttgtctgccggtctcaatgcgcccagcctcaataaacgtcgccaggcgttcaagcccctgacgcagtaaagcgggcatgctgtcgagttcgatggagtccatcaggtttttaacgttcaggcccaattcagtatccccttcaattcgcagacgccgcttgaagaacagcgtatcggggtcttccctacgcgccgcaaccaggatcaggtcgttagcgtcgccgctaaagcttacgtcagcctcaccctgttggcttacgcgcagcctgccgttatcgacggtcattagccactgtaggccgagatcggtaatatcgattttcagccaacggccggtcagaaaatcgagttccccttcagacagcgcctcctgaaattgccagcacagcacctgttgcagaacctggcgcttaagtgcaaaaggggtaaatttcaacggtacacttaacagtgacggcccttgacgcaccatacgtgctcgtagtttttgcaacactggcacttctcctttaggtaactgtcttctgaacaatattgcgctgaaaacgggtcattttgccatatcggcagttttgtaacgcagcctaaatcaatattgccctacaaaaatagtgcaccagaaatatcccttacacaacctctgccgtaaatggctttcattcaaccgcggataagctgccttaaatcaaaatattgccgtttgagcttatctaaaatgagcctcgattgggttgcacaccgtgccatccctctagccgttttagcaggagataactatggagttactttgcccggcaggtaatctgccagcgctaaaggcagcgatcgataatggtgccgatgcggtttatatcggtttgaaagacgataccaacgcccgacattttgccggtctgaactttaccgagaagaaattacaggaagccgtagagtacgttcatcgccgccgacgcaagctgcatattgctatcaacactttcgctcatcccgacggttatcagcgctgggagcgtgccgtggatatggcggcgcagctgggggccgacgcgctgattctggccgatatcgcgatgctcgactacgcagcaacccgctatcccagcgtcgaacgtcacgtgtcggtacaggcttcggccactaatgagcaggccattgcattctataaaaatcacttcgacgtcgcacgcgtggtgctgccgcgcgtactgtcgatgcatcaggtccgccagctctcacgcagcagcgtggttccgctggaagtgttcgcctttggcagcctgtgcatcatggccgaagggcgatgcttcctgtcttcctacctcaccggcgaatccccgaatacctcgggagcctgctcgcccgcccgctttgttcgctggcagcaaacgccacagggcatggagtcacggctgaataacgtgatcatcgaccgctacgaacctggggaaaatgccggttatccgacgctatgcaaggggcgttatcgggtggacgacgtgtgctaccacgcgcttgaagagcccaccagccttaatacactcgaactgctgcccgaactgttcgcagccaacgtagcctcggtaaaaatcgagggtcgccagcgtagcccagcctatgtcagccaggtaacgcggatatggcgcgctgccatcgaccgctgtcagcgcgatccgcagggttttatcagtgaacatgcctggatgaccgagctggggtcactgtccgaaggcacccagaccactcttggggcctaccaccggaaatggcaatgattaaggcgatatcatgaaatactcattaggaaccatccagtactactggcagaaagcgcaggtggaggcgttttatcaggctgcccaaggcagtgaggccgacattatttacctgggtgaaaacgtttgtaccaaacgacgagagatgaaggtcggtgactggctcgacctggcaaaacagctgagcgccagcggcaagcaggtggttctctcaacgctggcgcttttgcaggcaccgtcagaactgacagagcttaagcgatacgtcgaaaacggcgagtttttgctggaagcgaacgatatcggcaccgtaaatatggcggctgagcgcaaactgccttttgttgccggtcatgcgctcaactgctacaacgccttcacgctgaagatactgcatcggcagggcatggttcgctggtgcatgccggtcgaactgtcacgtgactggctggccaatatgctggcgcagtgtcagtcgcttggcatccgtgacaagtttgaggtcgaggtattggcctacgggcatctgccgctggcttattccgcccgctgttttaccgcccgcgccgagaaccgcgccaaggacgactgcgaaacctgctgcgtgaagtatccgcggggccgaaaagtcatgtcacaggagaatcagcaggtgtttgtactcaacgggatccagacacagagcggtgcctgctacaacctcggcaatgacctggtcgcgatgcagggcctggtcgatattgtccgaatctctccacaaggcccggaaacactcggcgtgttagccgattttcgtgccaacgagcgcggccttaatccgctggcgcttagcccacgcgaagactgcaacggctactggcagaacattgccgggctagcgcttgtcgagtaagcagatcagtcgtttcgcagcggtttcttgcggtgcagcagcgtccgcaggcgaccgctgtcacgcaggaaaccgagcccgatgccgagcagcgtatagaacgcgcacagcaacagcagcatcaggatatccccacccacttcgtggaaaggcaggcccatctggttaacgccggcaatcgcttttgtcgcccaggtcgacggcagcattgaggagacgacgcgtacccagccgggctgtgcctgtagcggccagagggtgccggaaatgtaaaataccggcatggtaataaaagacagcgtcagataaatcatttcgacggtacgcaggcactcggtcacaaacttaccgaggccaagcacggccagtaaaaacgggaaggtcagcaggataatttcagcaatgctggcggtttgccggtacccaagcacccacggccacagcacaaacagcacgatcgacagaaacagccaaatcgggattagcgccgacaggccgccgagaaatgccgggattgcgggtttgccgtcgggcgcacttttcagggtaatgttgaccctgacactggctatcaacaaagagtgctgcaagagcatcaccagcagtccggggaaaacgatcgccgcgaagctgattcctgggttaaacaggtccagcgtctggccaacaataggcgtgagcagcacgttggcctgccgattgctgaacccgcttgccagaagaagttgcgtattatactgcgacagcaggctctgataggccgcgacaacatcttgctggatctgcccattggccaaacggttggttgcatcgccataaaccggaataacaatgtcttcacccgccagaatcttcttttcaagatcgatgggcatgataaccacagcaaacagcttgcgctcacccaggtcacgacgcgcctcgggaatgctgtcatagcttaccgttttaatctttgaggttgcatcaaggtcgcgggtcagcagacggctggcgctgctgtggtcctgatcgatgaccgccaccggcagatcccacacggtgcgattggcgtacacggtactcatcaggcacagcgagataagcagcatcatccacatcggcttttcaagcatcccgtgcagggagtgcgtgaaggtatgccagtaaattgaaagcccttcgcgcgtggtcattttcccggctcctgcttcttcaggcgcatatacagtttgctgtgcaccaacaggccggtaatcagtggatataccaacaatatggcgcacacgctgacgatacgcacgcctgggacctggcgcaggaaaacgtcgaacatggcgtttagggcatgggtcaacggctcgatttcggaaattatgcgtgcaggcagcggcatcgacagttcgggtaccgccatacccgagaaggtcagcgccagtcccacgaaaatagccatcatagagtaggcggagatagtggtgctcgtgaaggtgaacagcaacagccccaggctttgcgccgcaatgacgtagaagaaggcgataagcagcatgtccagaggattgccgctgactcgcgcatcaaacacgccgaccagcaaggcaatttcgaccatcagcagcgtggtaaagcacagcgtatagggcgcaagcttgccgagcagtccgaaggtgaacgagggggcagcaaggagcgcctggctccgcgccatcacgtaaatcatacaggtgacggtgaacaattgcagcagatggatggttgcggcgaactgctggtaatagatgtagctgccgctggcgttaaacaggctgccgtaagagagatcgacactggcaagcgaaggcacagttttaccgatttctgcggcgataatgctgcgatagctattgttcagctcggttatcagtccgctaaaatcctgagtagaatagaggcccgcgccgtaaaacaaggcattgtaatacagcacggcgctcggctggcgtcctgcgagcacgtcggcctcaaagcgcggcggtatgtacagcagcgcgtagtcctgcgcggtacgcagccgatattccgcctccggaagtccgcccgcataggcctcgacgtgcgcgtgcgaacctgcgtcgagcttgcggatcaactcttgcgatagcttgctgtggtcgctgtccaccactgacaccgggagatccagcagcgtaccctcagaaaaattactggcaatcagcgtaaacaggatcagcggaaagcaccagcacagccagtggatcaccggttggcgaaaagcgtggttcgcctcacgggtaaaggatcggctgaagcagcgccatgcggctttggcgcgatgagttgcgtgtgccatcagtggctcgctttccactgccaaagcgcgctcatcccctgccttaatccttccaccggctgcagcggatagagccgaacttcgaaggtttttaaatcgaagtcgccggtagcgcgcgttgcgcgtttggtggcgtaatcgcccagcggtgcaatgtagcggatttccgcttcaacctgtttattgccaatccccggcacgcgcagcgaaattttgtcgcctttacgaatgccggccagaatatcttctcgcagattgaaaacgaaataggcctgaggcagttggaccagcgtcaacagtgggctgtccgagctctcaagttcaccgacttctgtcggaatcggtccgacttcgccatccaccggcgctcttacctggagatcgtcggtttgtgccttcagctctaacagattctcttccgcagctcgcagctcggcggcatacacctcgcgctgttcaatacgatcgccatttacgccttcgtcgaggttagctttcgcggcttgaacctgctgataggcgctatcgcgggcttcacgcgaatcttcgagatccgaagcagaaatatagcctttcgccgcgacgctggcattacgattgtagaggtcacgcgcattggcgtaggcggcctgcgcctgggccagcgctgctttcaggttgcgaatactctcttcacgggtaccattaagcgagagatcgagctgcgccttggcctgatcgcgcgacgcttgtaacgatcgcaactgtgccatgagctcggggctgtcgagagttatcaacagttggcctgctttcacatcatcgccgcgttgaacgtgacgttcaacgatccgccccttggctttcgacgcaacgataacctcgggtgcgtcgacctctccctgtaataaaagtgactgattgctagcgcgaaataagacggcaagagaaataaccacagcaacgagcagtaaggtcagcaatatccttttattcatattttctcttaccttttaatctatttaataaagctatttctagcacatattttaagggtttataaggcattggattgtgacgattacttcacaacgacctgacgcaggacgctttaccgctcaaatagcgtattcaggcagcgataaatggtgaatactgattttatgattagctgacaaatatcaaaattttgtcagagataacaaggtgaaaaaatatgtctgaagctgtcgccaaaaacattgctgtgcctttttctgtgctcgatctcgcgcccgttccccaaggcaagacgcccgccgacgcattccagtcctcactggagctggcacaacacgctgaaaaatggggctatcaacgctactggttagccgagcaccataatatgaccggcatcgccagcgccgcgacctcagtgcttatcggccacattgccggaggaaccaagacgatccgcgttggatccggtggtgttatgctgccaaaccactccccgctggtgatcgctgaacagttcgggacgctggcgacgctgtatccaggccgtatcgatctgggtctgggacgcgcgccgggcaccgatcagcgcaccatgattgccctgcgtcgacatatgtcaggtgagattgataacttcccgcaggacgtgcaggaactgcaatactatttcggcgatgttcaaccggagcaacctgtacaagcagtgccaggacaggggctgcatgtgccaatctggctgctgggctcaagcctttacagtgctcagcttgccgctgcattaggcctgcctttcgctttcgcctcacattttgccccggatatgctctatcaggcgctggcgatttaccggagtaaattccagccttctgcccagctgcaaaggcctcatgccatggtgtgcctcaacgctatcgccgccgataccgacgaagaggcacgccgcatgtttacctctaatcagcagcagttcatcaatttacgtcgcggtaagccggggaaattgcctgctccggttgataatattgagagcctttggtctgcccaggagcgtttcggtgtggatcaggcgctgcgcctgtcggtggtgggtaataaagagagtattcgtcagggcctgcaggccattctgcgtgagacagaagcggatgagctgatgattaatggccagatctttgaccatcaggcccgtttacactcctttgaaattgtctcgcagctgcagggcgaactggtgaaaccggcacgcatcgactgatactgatgttttgcgcccataaaaaaaccagcccgagggctggttttttattgctcatctaccgatgacccgagggtcagacagattatgcgtcagtagtacgacgtggtgcgcggcttggcggacgacgttcgccagcagcagagttaccaccttcacgacgttcgccgttgaaaggacggccacggccaccttcacgacgctcaccgctgaaagaagaacgcggagcaccattaccacgacgctcaccagcggcaccagccggacgctcacgacgtgctgactgaggctgtgcatcgcccagcaactgcatgttcatcggcttattcaggatgcgagtacgggtgaaatgagacagaatttcgcccggcataccttttggcagctcgatagttgagtgtgaagagaacagcttgatgttaccgatgtaacggctgctgatatcgccttcgttagcgatagcacccacgatgtggcgaacttcaacgccatcatcacggcccacttcaatgcgatacagttccatttcacccgcgtcacgacgctcacgacgtggacgatcgccttcacgcggcgcaggacgatcgccatcacgtgctggacgacggtcattgcggtcaccgcgctcttcgaactcacgacgtggtggacggcttttgaatacgggatcagcggcaacgatcagaggacgttcgccctgagccattttcagcagtgctgcggccagagtttcaatatccagctcttcttcaggctgaagtttagccagcagtccacggtacaggtccagatcgctgctttccagctgctgctgaactttggcggcgaacttggccagacgacgttgacccagaacttctgcagttggcaattccacttctggaatagtcagcttcatggtgcgttctacgttgcgcagcagacgacgttcgcggttctcaacgaacaacagcgcgcgacctgcacggccagcacgaccagtacggccgatacggtgaacgtaggattctgaatccatagggatatcgtagttcacaaccaggctgatacgttcaacgtccagaccacgtgctgccacgtcggttgcaatcagaatatccagacgaccgtctttcagacgttccagagtctgctcacgcagggcctggttcatgtcgccgttcagtgccgcagagctataaccgctacgctccagcgcttcagccacttccagggtcgcgtttttggtgcgaacaaagatgatagctgcgtcaaaatcttctgcttccaggaaacgaaccagtgcttcgtttttacgcataccgtacacagaccagtagctctggctgatgtccggacgcgtggtgatgcttgactggatgcgaacttcctgtggatctttcatgaagcgacgcgtaatacgacgaatcgcttctggcatggttgcagagaacagcgcggtctgatgttcagccgggatctgcgccatgatggtttctacgtcttcgatgaagcccatacgcagcatttcatcggcttcgtccagcaccaggccgctcaggttagagaggttcagggtgccgcgtttcaggtggtccagcagacgaccaggcgtacccacaacaacttgtggaccctgacgcagtgcgcgcagctgcacgtcatagcgttggccgccgtacaatgcaacaacgttcacgccgtgcatgtgtttagagaaatcggtcatcgcttcagcaacctgaaccgccagttcgcgggtaggtgccaaaacaagaatctgtggtgctttcagggaagcatcaatgttgtgcaacagtggcagcgagaatgctgcagttttaccactaccggtctgggccatacccagaacatcacgaccgctcaacaggtgaggaatacattcggcctgaatcggtgatggtttttcgtagcccagatcggtcagggcagaaatgataggagcagacagccccaggtcagcaaaagaggtttcaagctcagtagtcatgtacacgtgcctcattaataatggcagccagtctacataactcgtcgagaaaattttcagtcattttcattgaaaagtgtgaaccggctcaaattagtttataaaacgaacaaagcaaccctcgcccgttaagacgattaaaaatggcatagcaccatggttaatcaggctgattggtttcgtcagctattgctggtccgattctgataggtcgtcttgctcttggcccaaaagcgccaattccaacaatgcatagcggtgctcaacaaaattatgaacgttgttagctaccgtcagtttgaacagtgcagaagcgctgtccttgtcccccagacttaggtagtgcttacctaaatagaagtcagtttcactgagatgctcagcgagcgaagtgttatccgttgcttctgccttcaggcggtccatcagcgtggattcgctgattttgccaaggtagaattcgacgatattccatccccattgccctctgtccgctttgtcataacgctcttggagcgctacttcggcattctttggattgatttctctttccacaagatacagccataacgaacggaagggatcatttggatcgtctcgataaaacgcctgcaaatcatcctgcgctagcgaatatctgccaccgtaatacagtgcgataccgcgattcaaacgcgcgtaattgtaagttggatcaagctctagtacagaatcaaacgcttcataggcggcatcgtagttgccggcctgcgttaggtaaatccccaggtagttaaaaacttctggcatatcaggacgaatagacagcgcttgtgagaaatcatttcgcgccagtgctcttagcccgagactatcatacagcacaccgcgctcatataacagctgtgcgcgttcatcatctgttaatgatctgctggcaagtatttgttccatacgcgccagaatcacttcctgctgcaaagttggctgcagcgggatcgccaggacttcgtttttgcgccaatcatggttgctgcatcctgccaacaaaagtgttgtcgcaacataacaacagcgcaagaaaggcttcatttcaactcccgaagacaaacattggacaaacttcctgttatccgcttgcttagcataagtacgtcctgcactcatgatacgaacagctcccggcccgatgaccgggagactgtaaactacaggttacagattactctgcagctggagttgccgattcttcagatggggtggtcgcttctttaatgctcaagcgcacacggccctgacgatcaacttccagaaccttaaccggaacttcctgacccatcgtcagatagtcagtcactttctctacgcgcttgtcagcgatttgagagatgtgaaccagaccttctttaccgccaccgatggcaacgaacgcgccaaagtcaacgatacgggtaactttaccctggtagatgcggccaacttcgatttcggcggtaatttcttcaatacgacggatagcgtgtttcgctttttcgccgtcggttgcagaaattttaacagtaccgtcgtcttcgatttcgatagtggtgccggtttcttcagtcagtgcacggattacagaaccacctttaccgatgacgtctttgatcttgtcagcgttaattttgatggtgtgaatacgtggagcgaactgagagatatcgccgcgagattcgctgattgcctggttcatcacgcccagaatgtgcagacgtgcacctttggcctggctcagagcagcctgcatgatttcgcgggtgataccttcgattttaatatccatttgcagtgcagtgataccttcgctgctgcctgctactttgaagtccatatcaccaaggtggtcttcgtcacccaggatgtcggacagaacgacaaagttttcgccttctttaaccagacccatcgcgatacccgcaacggcggctttaatcggcacacctgcgtccatcagggccagtgatgcgccacaaacggaagccatggaagatgaaccgttagattcggtgatttcagatacaacgcgaacggtgtatgggaaatcttcaaacttaggcattactgccagtacgccacgcttggcaagacggccgtgaccgatttcgcgacgcttaggcgaaccgaccatacctgtttcacccacggagtacggagggaagttgtagtggaacaggaaggtgtcagttttggcacccatcagttcgtccaggctctgcgcatcacgggtagtccccagcgttgcggtaaccagtgcctgagtctcaccacgagtaaacagtgaagagccgtgagtacgtggcagtacgccagtacgaacatcaagaccacggatcatgtctttttcacgaccatcgatacgcggtgcgccactcagaacgcggctacgtacgacgtttttctcgatagcgcccagcagatcggagatctcaccagcgtccaaggtttcgtcttcggcaagcagtgcagcggtaacttcatctttgatggcgtcaacgcgagcgtaacgctcttgcttgtcggtgatacggtaagcgtcgcccagcagcgcttcagatttagccgcaatgcgagcttgcaggtcagcattaaccacttctggctgccaatcccacttaggtttgccaacttcagcaaccagtgcattgatttcgttgataacgatctgctgttggtcgtggccgaataccacagcgcccagcatctgctcttcgctgagcacttctgcttctgattcaaccatcagaaccgcgccctgcgtaccggcaacaaccaagtccagtttgctttcaagcagttcatcagccgttgggttcagcacgtactggtcgttaatgtaacccacgcgagctgcaccgattgggccgttgaatggaataccagacaggctcagggcagcagaggcaccaatcatcgcaacgatgtctgggttaacctgcgggttcagagaaacaacggtcgcgataacctggacttcgttcaggaagctgtccgggaacagtgggcgaattggacggtcgatcagacgagaagtcagggtctcgccttcgcttggacgcgcttcacgacggaagaagcttcctggaattttaccggcagcgtaagtacgctcctggtagtttacggtcagagggaagaagctctggcccggtttagcttttttctggccaacaacggtaacgaataccgcggtgtcgtccatgctgaccataactgcagcagtggcctggcgtgccatcataccggtttcgatggtcacagtatgttgaccgtattggaacttacgaactgtcgctttaagcaatgtaatatccttttcttgtgacgcgcagctgttatgacagcagttcacgtcaataaaatctgaacttctcactacatcctcgcgactaatgacaatccttaatcctctcggcgggattaaagtctctcattagccgcgcgaacctctgtaacggaagatctcgcgaaacgtactctttaaaactctacttttttataaagcttcatttatagaaaagtagcgtagaaacaacagatttggcaatagctagattgactcttgctgcctagaataaaggggccacttggcccctttacactgaaactcgctaacttagcgacgcagacccagacgttcgataacggtggtgtaacgtgctacgtctttgctcttcaggtagtccagcagcttacgacgctgagaaaccatacgcagcagaccacgacggctgtggtgatcttttttgtgctcggagaagtgaccttgcagatggttaatctgagcagtcagcagagcaacctgaacttcggtagaaccgctgtcgtttgcaccacgaccgaagtcagcaacgatttgagctttagcttcaacgcttagagacataatgaactccaaaatattatagattaatttaaacgggtgccgatctctaattcagctaccccatgcataagctgcgctattctactctttgagatgcccgatcgcaacacgagcaacaccctgttaactcgccttcctgtatttacaggctggcaaattactcggggtactctacaaccaggcgcttaggagcaacgcggccttgatcgtcgatttcaccgacaccgatgaatttacgttcttcgccttccgtcatgcgcaccaggcccgaaagcggtgcacctgaagcctgaacaggttggccctgcttgacgtagccggccacaacgggcagtaaattgacttcagggaagtcttcacacgggctgtccatcggcagcaacagcgggtcgagcagcaggcgcggttcaatgccttcggcctcggcctgagcaaccagcgcgtgcagctgttccatggtgaccatacgttcaaacggataggtcgcaacctgcagacgtcgcaggaaggtcacgtgggcgccgcaacccagcttttcgccgaggtcatcaacgatggtgcgaatgtacgtcccttttgaacagtggatctccagctcaacctcgttgccttcccagcgaatgaactgtagttcatagaccgtgatgctgcgcgattctcgcggaacttctatcccttcacgcgcatactcgtaaagcttgcgcccttgatatttcaatgctgaatacattgaagggatttgctgcgtctccccacggaaactttcgagggcattctcaagctcggcagcgctgaatgtgaccggacgctctgaaattatctgaccttcggcatcagaagtatcagtacgctggcccatgcgggcaatcacgcgatagcgcttgtccgagtcgagcagaaagcgtgaaaacttggtcgcttcacccaggcacagcggcaacatgccggtggccaggggatccaacgcgccggtatgacccgcgcgattggcgttataaaggcgttttaccttttgcaacgcgtcgttggatgacaaacccagtgacttatccagtaacagaacgccgtgaatatcacgaccgcggcgacgtggacgactcattaagattcctcgtcatcgcctgcagcagaacgacgttcaacgtcattcttaacaacgttagtcaccaggttagacatacgcatgccttcaaccagtgagttgtcataggcaaaagtcagttcaggcacgacgcgcaggcgcatggctttaccaatcagggtacggatgaatccctgagcgtcttgcagggccttgataccgtttttaacgcggtctggatcctgtggctcagtggtcagtacgtcaaggaaagtcacgaaaactttggcataggccagatcacgggaaacttcgacaccagagacggtcgccatgcctacgcgcggatctttaacttcacgctgcagtatgatggcgatttctttctgcatctcctgagagacgcgttgggtacggctgaattctttagccataatttgttactccaaacttttacttcaaccatgcatcagacaaataagggggcgcaaggcccccaatggttctgactgtatacccgagaatccgggtcagatcgaaacgttaagcgatagtacgtttaatttcgatgatttcgaagacttcgatcacatcgccaggacgtacgtcgttgtagtttttaacgccgataccacattccatgccgttacgaacttcgctaacgtcatctttgaagcggcgcagggattccagctcgccttcatagataaccacgttgtcacgcagaacgcggattgggttattgcgcttgatcataccttcagtaaccatacagcctgcgattgcgccaaatttcggtgacttgaacacgtcacgaacttcagccaggccaatgatttgctgtttgtactctggtgccaacataccgctcattgcctgtttgacttcgtcaatcaggttatagattacggagtagtaacgcagatccaagctttcgttttcaacgacgcggcgagcagaagcatcggcacgaacgttaaagccaaggatgatagcgttagaagccgccgccagcgttgcgtcggtttcagtgataccacctacgcccatgcccacgattttaactttaacttcagcggttgacagattctgcaacgcgtcagaaatcgcttcacaagaaccctgtacgtcagatttcaacacgatgttcagttcagacacttcaccttcggtcatgttcgcaaacatgttttccagtttagatttctgctggcgagccagtttaacttcgcggaacttaccttgacggtacagcgcaacttcacgcgctttcttctcgtcacgtaccacggtaacttcgtcacccgcagccggaacgctggacagacccagaacttcgacagggatagaaggacccgctgaggtgatgtcgcgacccatttcgtcacgcatagcacgcacgcggccgtattcgaagccacacaggatgatatcacccttgttaagcgtaccttcttgaaccagaacagtagcaactgggccacggcctttatcaaggaaggattcgattacaacaccgtttgccataccggtacgcactgctttcagttcgagaacttcagcctgcaacaggatagcttccagcaaatcgtcaataccggtacccgctttagcagatacgtggatgaatggagactcaccgccccactcttctggcataacgttgtactgagacagctcggttttaacgcgatctggatcagcttcaggcttatcgattttgttcactgcaacaacgataggcacgccagctgctttcgcatgctgaaccgcttctacggtctgtggcatcacgccatcgtccgcagaaacaaccagaacaacgatatcggtcgccttggcaccacgagcacgcattgatgtaaacgcggcgtgtccaggggtatcgaggaaggtgatcatgccgttttcggtttcaacatgataagcaccgatgtgctgagtaataccgccagcttcgcctgcggctactttcgttgagcgaatataatcgagcaaagaggttttaccgtggtcaacgtggcccatgatggtcacaactggcgcacgtggctcggcagcagctgaagcaccggtatcacggtcgctcatcagcgcttcttccagctcgttttcacgacgcaggataactttgtggcccatttcttcagcaaccagctgagcagtttcctgatcaataacctgattgatggtggccatagcgcccagtttcatcatagttttgatgacctgagaacctttaactgccattttgtttgccagttcggcaacggtaatggtttcgccaacgaccacgtcgcggttaacagcgactacaggcttgttgaagctctgttgcaggctgcttggcttacgcttacctttgccattacggcccacggcacgggcttcttcgcgatcggctttagattcagacagtttattgcctttcttctgcttggtcgctttgccaccgcgagtacgggtgcggcgctcgccttcaactttggcatcgttctcatcttcagcagcacgagcgtgctgggaagtggttacgtggtagtccgcagtttcagcttctgcttcacttggcgcaggggcttcagtccaaacgcctgagtcagccattttacgtgcttcttcagcaacgcgtttagcgttctcttcgattttgcgctgggcttcttgttccgctttacgcttaagttctgcggcttcagcttcacggcgtgctttttctgcctgagctggcttggttacttcgtcggtatgttgattcgtcactttatctttttccgctgcgtcacgcttagctttatcagcggcctcacgtttggcttgctcagcggcttcacgtttagctttttcctgagcggccacttgctgggcctgctcttgtgctacacgctgagcctgttcttccgcttcacgctttgcctgctcttccgcttcggcctgggcaagttctgcctcggtcatatcacgtttaacataagtgcgtttcttgcggacctcgatttgcaccgatttactcttcccgccggtgctcggaacattaagtgtactacgcgttttgcgttgtaacgtcagtttgtttgtcgcattcgaatttccaccattcaaatgcgccagcaaagtttctttttcatgctgggtgacagagtcagcttccgacttgtcgatccctgcatcagcaaattgctgtaccaggcgatcaaccggagtttgaatctccgctgccagcgattttacggttacatctgtcatgctgttccttcctgctacagtttattacgcattgtcgccaaaccagcagatattgcgtgcggccatgattaactcaccagcctgctcgtcattaagaccttcaatatctgtcagatcgtcaacaccctgctcggcaagatcttccagcgtgcaaacaccgattgctgccagtttaaacgccatgctgcgttcaagtcctgcaagattaagcaggtcttcagctggcttgttgtcaccgagactttcttcctgtgcaagggccagggtggtcagcgcttctttcgcacgttcgcgcagcgcatctaccgtgtcttcgtccagaccatcaatttctaacaactcgttcaccggcacgtaagccagttcttcgagggttgagaaaccttcttcaaccagaacagtcgcgaaatcttcgtcgattgccaaatacttggtgaaggtttcgattgcagcatgcgcctcggcctgatgtttggcctgcaggtcatctgctgtcatcacgttcagttcccacttgtcatcgccacgatgctgctttaaaagctgggaggctaaacgcacgttttggccgttacggccaatcgcctgtgccaggttgctggcttcaacggcgatatccatggtgcacttgtcttcatcaacaacgatagacgcgacgtctgccggcgccatagcgttgataacgaattgcgcaggattgtcatcccaaaggatgatatcgatacgttccccgcccagttcactggaaacggcctgaacgcgcgcaccgcgcataccgacacaagcaccaacagggtcgatacgcttatcattagtcttcactgcaatcttggcgcgtgaaccagggtcacgggcagcagctttgatttcaataagttcttcgccgatttcaggtacttcgatgcggaacagttcaaccagcatctcgttacgtgaacgactaacaaacagttgtgcaccgcgcgcttctgggcgcacagcgtaaagaacgccgcgaatacggtcaccagaacggaagttctcacgtggcagcatgtcttcgcgcaggataacagcttcagcattgctgccgagatccagggcgatgctgtcgcggttaacttttttaaccacaccggtcactatctcgccttcctgttcacggaatgcgtcaactaccattgcgcgctcggcttcacgtactttctgtacgataacctgcttggcagtctgagtggtgatacggtcaaaggtgacagattcgatttggtcttcgatgtaaccacccagttcgatggatggatcttcgtattgggcagcttcgagagtaatttcgcgcgtcggctgagtcacttcatttacagcaacccagcggcggaaggtgtcaaagtcgccggttttacgatcgatggtgacgcgaacttcgatttcctgctcgtacttcttcttggtcgctgtcgacaaagcagtttccagcgcttcaaaaatcttctcgcgcgggagggctttttcattagaaactgcttctacaacagccagaatctctttattcatcctagttgcctcatcctaactttaaaagtggggtaccaggttcgccttctggatgttgctcagtgcgaacacttcatctttcccatccaccgtaaccgtgatcatttcgccttcgacagccttgataattccctgccatttgcggcggttctgcattgccatgcgcaatacaacgctgacttcatcaccaaggaaacgttgataatgctctgcggtgaacatagggcgatcgaggcccggggaggaaacttccaggttgtaggcgacggtaatcggatcttctacttcgagtacagcgctaacctggtggctgacatcagcacaatcatcaacgttgatcccgtcttcactatcaatatagatgcgtagtgtagattggcgagctcgaacgaactcaatacctaccagctcgaaacctaatgcctcgaccggtgctgaaatcatctctgttaatttttgttctaatgtggacaagtccacccccaagacataaaaaaagggcttaatagcccagtgattctgttgccaaataacaaaaaaccccgataaatcggggctttatgatactggaccctatttgccgcatggcggcttcggtgcactttcagaaggatttttttcaaatggatactcggaagcaccagggagatactagcagtatatttgaaaacaaatacttgaggaaagtggttgcgggggccggatttgaaccgacgaccttcgggttatgagcccgacgagctaccaggctgctccaccccgcgtccgaaaacaacgtaacgcgtatatattgacgcgacttgatgtcgcaaaatactacgctgataaccgcaagaatgcaagttatcaaaagattggtaccgaggacgggacttgaacccgtaagcccattcgggcactaccacctcaaggtagcgtgtctaccaattccaccacctcggcactctttttttctcaatcgcgcttactgtccgagtaattgcaattgtttgaaactctttgcttttcagcactgacgactggcgtcaatcttactttaactttactgcgactacaatctacaacttacttaggaagatcgctggtcggccctgttggtgctgccggcgcagtagtctgctcagatttaactggctgacccagattttcccactcgctgccttgtttggttttattggtgctcaagttacccagaatcaggctaatgacgaagaaaagcgccgccaaaatagctgtcattcgagtcataaagttaccggaaccactcgaaccgaacaaagtgcctgatgcacccgctccgaaagaggctcccatatctgcacctttaccttgttgcagcataaccagaccgacaaggccgattgctacgataaggaaaatcaccagaagagcatcgtacatagttgtacctgtatccttgcgggttcaccgcgtgctaattgcttctcaccagcttcttactatgattagccgtaagtcttcaaggacctactgaagcgggtctgaatactaaccaaaccctaatgttcgcgcaagggcaattttcaggttagcgtttgattgcggaaaaaagcgccaaatacagcaatcccccgccctttacggcgagaagatgaacaatttggcgctcactttttacttttattacaattacaccgctttgactgcatcggcgatacgatgcgccagactctcaaccagagacgcgtcttcaccttcaaccataacgcgaatcagcggttcagtacccgacttacgcaacagtacgcgacctttgcccgacagctgtttctcaacctcggcggtcacgcttttcacttccgcattttcgagtggatcactttcacccgagaaacgaacgtttaccagaatctgtggcaatagtttcatgccgctgcacaggtcatgcaggctcatgtgattacgaaccattgcagtgagcacttgcaaacctgcgacaataccgtcaccggtggtggttttgtcgagtaaaatcacgtgaccggagttttctgccccgatgcgccagcccttctcctgcagtttctcgagcacgtagcggtcacccactttcgcacgcgcaaaaggaatacccagctgcttaagcgccagctcaaggcccatgttgctcattagcgtaccgactacgccgccgcgcagctggccctgacgcagaccctcacgcgcgatgatgtaaaggatctggtcgccatcgactttgttaccttcgtggtcgaccatgatgatacggtcaccgtcgccatcgaacgccaggcccaaatcggccttctcttccagtacacgctgctgcaacagagtcacgtcggtcgcaccacagccttcgttgatgttcataccgtcaggctcacagccgatggcaatcactttcgcacccaactcacgcatcacgcttggggcgatgtgataggtcgcaccgttggcacagtcgaccacaatcttcaaaccgctcaggctaagttctgcagggaaggtgcctttacagaactcgatgtaacgccctgccgcgtcgacgatacggctcgccttgcccaattcggcagactcgacgcaggtcagcggtttttccatctcggcttcaatcgcctcttccacgtggtcaggcagctttgcgccatccgttgagaagaatttgatgccgttatcgtaataagggttgtgggaggcggaaatcacaatacccgcctcggcacggaaggtgcgagtgaggtaagcgatcgccggcgtcggcatcggaccggtaaacgaggctgaaagccccgcagcggccaggcccgcttcaagagctgactcgagcatatagccagagatgcgcgtatctttaccgataatcaccttaccggagctatgacgagccagtaccttgcccgcagcccaaccgagctttagtacaaaatcaggcgtaatcggggtatcgccaaccttgccacgaatgccgtctgtaccaaagtatttacggttgctcataatttattctcatcccttcttagctgaaagtgttgcttcgacgatacgcatggcctgcaccgtttctttgacgtcatggactctgacaatatgcgccccctgcatcgcagcaattactgcgcaggcaacgctgccggtcacccgctgttcgggggaaacgtgtaacagctgaccaatcatcgattttctcgacataccgacgagtagcggtaatccaaaatggtgaaactctgccagtctggccaataattcatagttatggtgcaaattcttaccgaaaccgaaccccgggtcgagcagcaatttttccctcgggatacctgcatcgatgcactgcgcaatatgttgcacaaaatactgatccacttcagcgattaaatcaccgtattgcggcgcatgctgcattgtttttggctcaccctgcatgtgcatcaggcaaactggaagaccgctctctgcggcagcctgtatcgcacccggctcctgcaaagagcgaatatcgttgatcagatgcacgcccacgcctgccgactctcggataaccgacgcctttgaggtatccaccgacagccacacgtcaaaacgttttgccagcgcctcgacgaccggaaccacgcgcgacagctcttcgtcatcgctgacctccgctgcaccaggacgcgtggactcacctccgatgtcgagaatggtcgcgcccgcattgatcatctcctgagcatgatgtattgcgagatccagcgtattgtgacggccgccgtcggagaaggagtcaggggtgacgttgagaattcccatgacttgagggaacgtgagatcgagagtgctgccgttcgcggtgagttgcatgttgtgattccagtaaaaggggtattcccgtaaagcgattcttggtgcgcaatatgtaaaaaaccccgggcaaggccggggttttattttagtcagaacagactaggtaagcaaagccagacatcggccgacttacttgccgctgtactgctcgcacatcgtattgcctggattaggcgtacgtggctcatcgacaggcgtcggtgcttttggcgtaccgttgttgtcatcagaaccggtgctggttgctgcatcccaaccggctggcggacgaaccacatctttacgcgtcatcagatcgtcaatctgtggtgcatcgatggtttcgtacgtcatcagcgctttcgtcatgttgtgcaagatgtccatgttctcatccagaatctgacgggcacgcttgtagttggtctcgattaaagacttcacttcctggtcgataatacgcgcggtttcatcggacatgtgcttggctttcgccactgaacgtcccaggaatacttcgccctcttcttctgcatacagaagtggacccagtttctcggagaagccccattgagtgaccatgttacgggcaatcgaggtagcaactttaatgtcgttagaggcaccggtagaaactttacctgcaccgtagataatctcttccgccagacgaccgccgtacagagtcgagatctgactttcaagtttctcacggcttgcgctgattgcgtcgccttccggcaggaagaacgtcacacccagagcacgaccacgtgggataatagtcactttatgaaccgggtcgtgacccttgtctttcagtaaccagccaataattgcatggcccgcttcgtggtaagcagtagattctttctgcgcttcggtcattaccatggagcgacgttccgcacccatcatgatcttgtctttggctttctcaaactcgaccatcgacacaacgcgtttgttgccacgggcagagaacagcgccgcttcgttgaccaggttagccaggtcagcaccggagaatccaggtgtaccgcgcgcgattaccgctgcatcgatatctggagacagtggcacgcgacgcatgtgaactttaaggatctgctcacggccacgaacgtccggcaggccaacaacaacctgacggtcgaaacgacccggacgcagcaacgcagggtccaatacgtctggacggttggtggccgcgataacgataataccttcgttaccttcaaagccatccatctctaccagcatctggttcagagtctgttcacgttcgtcgtgaccaccgcccaaaccggcaccgcgctgacgaccgacggcgtcgatctcatcgatgaagatgatgcaaggggccgcttttttcgcctgctcgaacatgtcacgcacacgagatgcacccacacccacgaacatttctacgaagtcggaacctgaaatggtaaagaacggcaccttcgcttcaccggcaatcgcttttgccagaagggttttaccggtacctggcgggcccaccatcagcacgcctttaggaatcttaccgcccagtttctggaaacggcttggctcgcgcaggtaatctaccagctcgctcacctcttccttggcttcgtcacaacctgcgacgtcggcaaaagtggtcttgatctgatcttccgtcaacatgcgggctttgcttttaccgaaggacatcgcgcccttgccgccgccgccctgcatttggcgcataaagaagatccagaccccaatcagcaacagcattgggaaccaggaaataaagatagatgccagcaggctcggctcttcaggcggctcgccaacaactttcacattcttggtcaacagggtatccagcagtttaggatcgttgacagggatgtaggtcgtgtatttgttactgtctttcttggtaacgtcaatctcacgtccattaatgtgtgcttcacgaatctgatcttgggtcaattcggacatgaaggtagtgtaatctaccctacggccattagactcgctgggcccaaagctctgaaatacagacatcaatacaaccgcgatgactaaccagagaatcaggttcttcgccatgtcactcaagggattaacctcatattacaactgtgttaacaaacagcgttagggtactacgatttccgccctgtcgctacgatgtacacttctcgggaacgagctcgggaagcgtctggcttacgaatcttaaccttcgtaaacagggagcgaatttcccgtaggtattcatcaaaaccatctccctggaacaccttcaccaggaaacttccgcctggtgccagtacatcacgacacatatccagcgctaactcaaccagatacatcgattttggtatatcgactgccggagtaccactcatattcggggccatatcggacatgaccacctgaactttgttttctcctactctgtcgagcagggctttgagaactaattcatcacgaaaatcgccttgaaggaaatcaacacctacgatgggatccataggcagaatatcacaagcgataatacgccccttgttgcctatctgcgttacgacgtactgagaccatccacccggggctgcacctaagtcaacaacggtcattcccggtctgaacagcttgtcgacctgctgtatttcatcaagtttaaaccaggcgcgtgaacgcagcccttttttctgtgctgccagcacatatttatcgctaaagtgttcctgcaaccagcgactggaacttgcagaacgctttttattagacattatttagtaaccatatagttttcaaactaccctgagtagagcctttacaacaagctcttagcgtcgtttagtctatggctaagtcgtctcggcacgtcactcggttacacaccgagttggtgatatagatgagatggcggtagaatgccccgttttcaatcccaacttaagcaaaaaaagacgatgaatcttaacaataaacaaaaacagtacctgaaaggcttggcacatccgttaaaaccggttgtcatgctgggtaataacggcctcactgaaggtgtgcttgccgaaatcgaacaggcgctgcagcatcatgagctcatcaaggtgaaaattgcagccgaagagcgagaaaccaagacgttgatcgcagacgctattgtgcgtgaaaccaaagcagtcaacgtgcaagttatcggcaatatgctggtactgtatcgcccttctactgaagaccgcaaaattatattaccgcgttaactttttagagtttaacgaaaagcgctttggatttaacgaaaagttgctatctatacgtggttttacaaaaaggccttaacgggcctttttcattttaccgccatcatgaccggtaaaaagagcggcagtcatcacataaccaccgcctgaccactcaattaaatatattctactttcagcacttcgtattcgacgtcgccacccggcgttttgataaccaccacgtcctcggcttctttgccgatcaggccgcgcgcgataggcgagttgaccgaaatcaggttctgcttgaagtcggcttcgtcatcacccacgatgcgataagtctgctcttcatcagtatcaaggttcatcacagccaccgttgcgccaaaaatcacgcgcccagtttgcggcatcttcatgatatcaataacttgagcattggaaagtttagcttcaatttcctgaatgcgcccctcgcagaaaccctgctgctcgcgagcggcgtggtattcagcgttctctttcagatcgccgtgctcacgtgcggttgcaatatccgcaataatttttgggcgtcgaacgcttttcaggtggtccagctcttcacgtaatctttcagcgccacgcaatgtcatcggaatcggtttcatattttcactacctctaactttgtcctttcggtatacaccgtcctgaatttatcaggtagaaatcaagcctttaggatcgattcactcgggcgataaacaaaaaaaacctcacccggggaaagccccaagccaggattggtttttcattttgagtcgtattttagcctagagttcattcgggatcatcgtttactttcacccacgttgcgcccccgttcgttgcatcgtagtatggcaccacgtcatcctgcagttatccagagcctatactcaaaataatgcgttttttacgaattgtcagtggattagcctgcgcgattgctcttaatgcaaacgctgcacaggtagaaaactatactcaatacctgccagaaggcaccaacttgtcggtgctggtacagaagattggagcaaccacgcccgttgtcgattaccacggcgaccagatgggcctgcctgccagtaccatgaaaatattcaccgcgctggcagcgctgcttcagttaggtccggatttccgttttaataccacctttgagaccaaaggcagtatcagcgacggcgttctgcgcggcgatttgatcgcacgttttgacggtgacccgacttttaagcgtcagaatattcgcaatatggtggctgcgctcaaaaagcagggcgttaaagagattagcggtgacgtcgtcatcgatacctccgtttttgccagtcatgacaaagcgccgggttggccctggaacgatatcacccagtgcttcgatgccccgccggcagcggcgattgtagaccggaactgtttctcggtctcgctgtatagcgcgaccaaaccggacgagaatgcgtttatccgcgtcgcgtcttactatccggtgcagatgttcagccaggttcgcacgctggcaaaaggctcgccagatgctcagtactgtgaacttgacgtgatgccgggcgaattcaaccgctatacgctgactgggtgcctgactcagcggagcgaaccgttgccgctggccttctcgattcaggatggcgcggcctatgcgggcgagatccttaaacaggaacttttgcaggcggatatccagatagacggccgactgaaacgtcagacgcgcgtcaccccggcaggcactattttggctcaaacccagtcggcacctctgcatgagctgctgcacacgatgctgaaaaagtctgacaacatgattgccgacaccgtgttccgcactatcggccatcagctgttcggcgtacccggtacctggcgtgcaggctcggatgccgtgcgtcagatcctgcgccaaaaagccggtatcgagttgggcaacacgattcaggtagacggctcaggcctgtctcgccatgacctggtgtcgccaaaaaccatgatgcaggcgctgcaatatatcgccgagcatgacaaagagctggatttcatctctatgctgcctttggcaggccatgatggaactctgcaatatcgcggtggactgcatgaagcaggcgtagacggcaaggtgtcggcgaaaaccggctccctcgcgggcgtctacaatctggcaggcttcattaccaccgccagcggtcagcgtctggcctttgtgcagtatctttccggctatgccgtaccgcctgaagatcagcgcacacgtcgcgcacctttggtccgttttgaaagccgtctgtatcgggatatttatcaaaacaattgattggatgagggtctgagcacgttttatgaaattactcatagtcgaagatgatgacctgctgcgtcagggattaaccctggcgcttaacggcgagaactatgccagcgacagcgcctcgaccgcagcggaggccaacgcgcttttgcaaagcagtcagtacagcctgatcattctcgatctgggccttccagataccgacggcgccacattattacggcagtggcgccgccagaatatctcgctgccggtgcttatcctcaccgcgcgcgatgcgctcgaagatcgcgttgacggattagacgcaggcgcagatgactacctggtcaagccattcgctctggttgaactgatggcccgcgtgcgcgcgcttatccgccgctatcagggtcacagtgacaacctgcttgaagtcggcaacctgacgctcaacctctcgtcgcagcaggtttatcagcagggacaactggtcgagatcacgccgaaagagttcgctatcctctcgcgcctcatcatgcgcgccggtcaaacggtgaatcgtgagctgttgcagcaggatctttactcttggcaggacgatctgggatccaacaccctcgaggttcacgtacacaacctgcgccgtaaactcggcaaggatcttatccataccgtacgcgggatcggttatcgcctggatacgcctaaatgaccagcatgcgccgccgtctgttggtgatgctggcgctgatcctgtttgttacgcagctgaccagcgtgttctggctgtggcatgagagtcaggaacagataaacctgctggtcaatgacacgctttcagccaaggtacgtaacgctcacgtcgagaaagagatagccgaggccatcgcctcgcttatcgcgccttcattgaccatgctggcggtgacactgctgctgtgtttctgggcgatcaactggatcatcagaccactcaagcaactgcagcaccgccttgaaacacgctcggccgataatcttacgccgctgccgttgaacaccgagattcaggaagtcttctcggtgaccatcgccttgaatcagctgttagcccggctttcacaaaccatcgcgcaggaaaggctgttcaccgccgatgcagcccacgagttgcgcaccccgctggcggggctgagactgcatctcgagctgatggaaaggaaaggcgttgacggcagcagtatgttgataggccgtattgaccagttgatgcataccgtagaacaactgctgatgctctctcgcgccggacaaaacttcgccgaggggcaatatcagaaggttaatcttgtcatcgacgtaatagcgccattgcgggaagagctcgaggagctgctggcaggccatcgacagcgtctgattgtgaaacacagcgagcatgccgaggttgagggtgacgcagtgttgctgcgtttaatgctgaggaacgtggtcgagaatgcctaccgctatggcccacaagacagcgatatcaccataacgctctcagaaagcgatcagggcgttttagcgcaggtagatgactgcgggcctgggattgaagagaaacgcgtaggagagcttacacaggcctataaacgtgccgatcaacgcttcggtggcagtggtctggggctcaatatcgttttacgtattttgaatatgcatggcggaagcctgcgtctggtcaatcgaaaagaccgcagcgggctcagcgcgcagtgctggttaccgcgtcaggcctttacgcaaaacagtgcgacctcgctgtcagaatagcgaaaacgccaaaagaaaaggccgcattgaatgcggcctttttttcgtcatgatggaggtcgatgactacgcgtaattaacgctcataaatgatttcaacgccttcgtcgtcttcatcatcccagtcgtcccagtcgtcatcttcttcttcgaccacggccagctgttcacggtgataatcatcccacatgaactcgactttctccggtacggcttcttcaacggacatgtgcttaggattctcgttgatgaacttcatcacttcccagcacagcgcgttaacgccttcgcggttggcagcagagataaggaagtaatcgccttcccagcccatgccctcagcaatttctttcgcgcggcgttctgcttcttcctgaccaatgacatcaatcttgttaaagaccaaccaacgcggtttttctgccagtttctcgctgtactgctgcagctcattgatgatgactttggcattttcaaccggatcagattcatcaataggcgcaatatcaacaaggtgcagaagcacgcggcaacgctcaaggtgcttcaggaagcggatacccagaccggcaccgtcagaagcgccttcaatcaggcccgggatgtcggcaaccacgaagctctgctcgtggtccatacgcactacgccgaggcttggcaccagcgtggtaaacggataatcggctacttttggcttagcggcagaaacggcacgaatgaaggtagatttaccggcattcggcaagcccagcatacccacgtcggcaagcaacataagttccagggagatatcacgcatttcacccttggtgcccatggttttctgacgcggagagcggtttacggacgatttgaagcgggtattgcccaaaccgtgccagccgcctttcgcaacgagctgaacctgaccgtggcgggtcatgtctgccagaacttcgccggtgccctgatccagagcgcgagtcccgacaggaactttgacggtaatatctttaccgcgcttaccggtacagtcacggctttggccgttttcaccacgttcggcgcggaaagattttacgaaacggtaatcgatcagcgtgttaaggttttcgtcggctatcaaatacacgtcgccgccgtctccgccgtcaccgccgtcagggccaccacgaggaatatatttttcgcggcggaagctaacgcaaccgttgccgccatcgcctgctacgaccaggatcgtcgcttcatctacaaacttcatttgaactgtctccgtaaatcattcacccggatgctgcaatcagccgccaggtcttgttctgttcttggttgccattacgatggccaattgcagaaaatatcgcccctgcaacgaccacaaaggcaccgaaataacccgtcaggttaagcactgcagaacagaagacaggctacttgccagcataaaaaatgtctcaggcttcgccaaaggaagcagtgcgatagcacataaagtgtacagcaaaaagagaagccgcgttgatgccagccctcttaacattcatttttttcttgccggtcttggccaacagaatgtaaaaagccccgcaactaattgcggggcttacatcactttcaaggacaagagaaaggtaaattattcagcttcgatgctgatgaatttacggttgttcttgcctttaacttcgaacttgactttaccgtcagtcaaagcaaacagagtgtggtctttaccgcaacccacgttgataccagcgtggaatttggtgccgcgctgacgaacgatgatgctgcctgccagtactgcttctccgccaaagcgttttacgcccagacgtttagcttctgaatcgcgaccgttgcgggtggaaccgccagccttcttgtgtgccattgttccgctctcctaaacttaagcgctaatgccggtgattttaacatcagtgaaccactgacggtggccctgctgcttacggtagtgcttacgacgacgaaacttaacgatcttaattttctcgccacgaccgtgagcaacaacttctgccttgatcacaccgccagcaattaaaggcaagccgatgttgatttcttcaccgttagcgatcatcagaacttggtcaaactcaattgtttcaccagttgcgatgtccagcttttccaagcgaacagtttgaccttcgcttactcggtgttgtttaccaccactttggaaaaccgcgtacatataaaactccgctttccgcgcactcaactttgtatagttcagagggcgctataaatattcacaatagggcgcgaattctacgcaaaaactcagcatatgacaagagcacattcaccagaaaagaagaaaaaaagcgcagttcacttgaacgcgtttatctcactcatttttcaagtacaatctctgctacagtttgcatcatgtgccaatgtgagcccgttctcattgcggtgaagagaaataaagccgaaaaatcacaatgaacctagaacagattaccgacctcaccgaacaggatatggctgcagttaatgcggcaattctcgaacagttgaactctgatgtttcgctcatcaatcaactaggatattacatcattagcggtggtggtaaacgaattcgcccgatgattgccgttcttgctgctcgcgcccttgagtatcagggcgacaagcacgtcaccgtcgctgcgttgatagagtttatccacacggcgaccctgctgcatgacgatgtggttgacgaatcgaatatgcgccgcggtaaagcaaccgccaatgcggcctttggcaacgcagcaagcgttctggtgggtgactttatctatacccgtgcgttccagatgatgaccgacctggaatcacttccagtgctggcgttgatgtctaaagcagtaaacgtcatcgcagaaggtgaagtgctgcagttgatgaactgcaacgacccggacattactgaagagagctacatgcaggttatctacagtaaaacggcgcgtcttttcgaggcagcggcacaggcatcagcgatgcttgccggcggtaatgaggcacaggttcgtgccttgcaggactacggtcgttacctcggcactgcgttccagctgattgacgatctgctggactacgacgctgacggagaaacgctgggcaaaaacactggcgatgaccttaacgaaggcaaaccgacccttccacttctgcacgcgatgaaaaacggcagtccggaacagtcaagcatgatacgcctggctatcgaggaaggtaacggcaggcatttgctggagccggttctgcaagccatgcatcaatggggttccctggtatataccgccaacgtgcagaggaagaagcagacaaggctatcgccgcgctgcaaatattgcctgagtcgccttatcgtctcgcgctagagggtcttgcccatctggccgtgaaacgcgatttctaactgaatcttttttaagcaacatctggctggcagggtccctccctatggggtgccttgcctattcacactgtccctcattgacgctcttttctctggctggccctaaacgactaattatcgccatcatcccctcgcgtacaatgaacgaaataatctgttcacgttccgaatctttgagctgtttataactctcaatccatatcaacaggggtcatgataggaagcacaaagatattcagcggatttttcctgaatgattaatgcgggtttcatcattttcggtagactattgatatgatattccaccgcccttccctgaacacccacgcgacggcgtttttcccattcttgccgtctggccattccatggataccctgcgttgaagtcggcagaccatttaatccgacgagatcccttgctgaaaaccattcctttttcatggcgatccttttaattgtcttaagctctagaagtcacgcagcccatgtttgcggtcacgcaatctacagttaacacataaggtaactcatttacatcaacggttaattagaaatttagttcgttaaaaattaataatttgagaaaatatctatttaataaatggtttcatccaatacattcagcctatttatcatttcagtcaaaccttcccgaacaataaaggttataacctgccttctctctatttcatctagttgcttataactttcaatccaaataaccagcggatcctgataatgagaataaagatactgtgccgactgttcttttagcactaaatttgaaattgttttaaccgggagactgtctacatgatattcaacgcctcttccctggacaccaaaccgccgacgtcgaacccagctttgccgtcttgccatactgtggactccctgagtagatgaaggaagtccagtaaaaccaattagttccttcgctgaaaaccactcttgattcataaactttctctcttgttatctcatctatttacgtaatgcaaattataatctccacatcgagataataactcatatttcagggtaataggctagcacctgcatttacatagaacgtttaacttataccactacacaatacgcctatgcatcacgaaattaaaacctggcgcagcataatcgtgatgaaatatttttattgagaataataaaattaaatgagtcatttaactctctaaggtaagttgagcttaatatctaataaataatccttacaaaaaccattactttcatcatgatataatttaaaaaagtatttcagataaacttttttaggaaacatgaaatcaaaccactcatttaatattacttcacgtttctaaaaaaacctcgccccctaaaggtaattggcttctaataacatgacgatttgcgataaaatataaccattacagatggttgggacaggcaatgaaatagcattgcggctttaaataacaggtacaactaatgattaaaaataatcattaatttttagaaagtaatttgaagtcatctcggaaatttgctcttatatgtttctcaatgcaaaggttaataatcgattgacttaaacgatcacgtgccagctcataatacaagggagcaattatgcttttacggaaagaagattggcatcacgcggatattatcgcgtcgctgcataagcaacgcaccactctggcagctttatcacgctctgccggattaagttcttcaacgctggcaaacgcgttatcgcgaccgtggccaaaaggagagtggataatcgctaatgccttgcagctacatccttcagagatatggccaagtcgctatttcgacccaaaaaccgatgaattaatagaaagaaaaatgcgcaaacacactcagcagatgcctaagcctgacctcgcgggggattaacgtatattgtcctaacaagacagacgctgaagattaaacaataaaaccgccggagggatccccggcaggttttaaaatattaataggataggcaggtaatattattctcgtaaataacttatggtaaatcacggcatcaaacttattaatcaatgcgttattattccgtgtttgatgagagcatttttcagacacggtttcaaaatgatcacttgttgacgaactgctccccaagttcgatatctttatgcagtacggaaagcatggcatcaagcgcctgcttttcgaatgcgcttaaatgaccgatctccttaaattctgcaataccatttttgcccagcaataccggctgtgcaaagaagcgcgcatattcaccgttccctcgacataagagcattcaaccacgccggattttccctggagagcattaaccagtgaaagtcctaaacgcgcggccgcctgtcccatggaaagcgtagctgagccgccacccgctttagcttcgacgacttcggtgcctgcgtcctgaatatgccgggtcaagttttcgacctcactgtccgagaaactgacgccggggatttgggaaagcaaaggcagaatagtgacgcccgaatggccaccaatcaccgagacctcaacctcttctggtgacttgcccttcaactctgcgacaaaggtatttgcccgcagcgtatcaagggtggtcacaccaaacagtttgttcttgtcgtacacacctgcttttttgagtacttccgcggcaatcgcaaccgtactattcaccggattggtgataataccgatgcaggcacttggacaggtggtggcaatttgctgtaccaggtttcgaacaatacccgcgtttacgttaaagagatccgagcgatccataccgggcttacgcgctaccccggccgaaatcagcaccacctccgcaccttcgagcgcagggcgtgcgtcttcgccgctaaatcctttaatttttactgccgttgggatatggctgagatcgaccgccacgcccggcgtaacgggtgcgatatcatacagagagagttcagagcctgacggcaattgcgttttgagtagtagagcgagggcctgaccgataccgcctgcggcaccaaggactgcaactttcatcctatactcctttttaaatgacgttaaaaaataccgcgcattcatttacttaataaccttagtaaacacctgtattaaaaacaaacaacctatttagagattgcgacgtagcgcagaaattaaattgttaaatcattttggtttattgaggtgttttgttttcttatcattgagataaaaaagttcaggaataaaaaataaagcgggggcatcatgcgaggataaaaattaataaacaactatgcggtttaattatcaaaaaaaattaattttatccatattattttaaagtttaaaaattaaaaaattcatagattcggcatatccatttcttgtattgggcagatggatgagctttatccctaaattttaactgtttcttcattatttgaggggagttttattgcataaaaatgcaaaattatgcataatcaacgaaactaacatcgtgatgctatgggtgcaaaatgcgtaatcctgccaaacaggaagatttaatcaaagctttcaaggccctcttgaaggaagagaagttcagctctcagggtgaaatcgttctcgcactacaggatgatggcttcgaaaacatcaatcaatccaaagtctctcgcatgttgaccaagtttggcgcggtcagaacgcgtaatgccaagatggaaatggtctattgtctgccagcagagattggtgtgccaaccaccaccagtccactgaaaaacctggtgctggatatcgactataacgacgctgtggtagtaattcgcaccagcccgggtgccgctcagctcatcgctcgcctgcttgactcactcggcaaatccgaaggtattctcggtactatcgccggtgacgacaccatctttataacacccgcgcgcaagtttaccgttaaacagcttcacgacgctattctcagcctgtttgagcaagagctttaacccgtttctggtcagcagacgtagcgctgctgacccgcctatcaccaaacacttccctattcacttcaactttatatacattttgtgcgccctaatgcaccctcgccagcacgatcccctgataaataccgcacagatagctcatttatactaattcattgatttgtaaaatctttaacaagaaatgaacaataaaccatcattttttattcttttcggttattaaaaattcagtaacgtggcttattgctcaataaaatactattagcaaactattaatttttgccgttattagacgtataattattttcgtgatgagaatcacagttcgtgagtagatcgcccgaggttattggcgtttggcgttctctgaaaaacacgaattccgtaagacgagatttgaatatcaattcaaatgccgccgataaaccggatttatcgctgcaaaaactgatgcattttgttcgcaaactttgttagcacggaacgcgcgacgatgttaatgcataatgtccttttcagtcctgatgaatccattaattaatctgcgctcagcctgcacacagccattgtctgcacgcgaaaggatgcgcaaaggtaattgaggaaattatcatgaaaatcattactgctatcgccgctctgggtttactttccgctgtttcattcggttcttctgctgcacagttggttaataatcaacaggccgaaaatctgcaacctatcggtaccatctccgtaagcggtattgatggcgtgccaagtgatattcgccaacagctgtcacagaaagcagacagcgccggtgcatcatcttatcgcgtaattgaagcacgcaatgagggtaactatcacgctaccgccgagatctataaataagaatttggatcctactcgatcactgcgttttattgctttaccgaaccctcgtcgtcctgtccgacgacacccttttgccctcgcttgcgagggcttttttttaagggtcaaaaacttatttcttgccgccttcctgcgctttatgttccagcgcggctaacagtttgccgtggatcccaccgaaaccgccgttgctcatcaccagaatgtgatcgcccggctgtgcggttttggcaatcatctcaaccagcgcgtcaacgtcagcatgccaatgcgcaggctgaacgcagcgctcagcaacttctgcgacctgccaaggaatattgtgcggctgcagcaggaagacttcatcggcacgtcccagtgaaggcgccagctcatttttactcattcccatcttcatggtgttggagcgcggctccagcacggcaagaatgcgcgcggtgccgccgactttgctgcgcagggcagccagcgtggcgaggatggccgtaggatgatgcgcgaaatcgtcatagacagtcacaccgtgggcttcaccgcgcagctccaggcggcgacgcgcgttgatgaagctgcctaatgccttgcaggcgtcggctggcgtaacgcccacgtggcgcgccgcggcaatcgccatcagggcattatgcatattgtgctcacccaccagcgaccacgacacttcaccggccacttctccgttgaggtaaacctggaacttgctggcatccggcgtggttttcttcgcattccaggtgcagccttcgccagtgtgctcctgctcgctccagcagcccatcgccatcacctgcttcagcggagtgtcatgttcaggcagaataattttcccctgtcccggcaccagtcgcaccagatggtggaactgtttctgaatcgctttcaggtcgtcaaagatgtcagcatggtcaaattcgagattgttaagcaccagcgtgcgtgggctgtaatgcacgaatttagaacgcttgtcgaagaacgcacagtcgtattcgtcggcttcaagcacgatgaacgggctattacctagacgtgcagaaacgtcaaagtttcctggtacgccaccaatcacaaagcccggctcatagccgcaggcttccagaatccaggtaaccatgcccgatgtggtggtcttgccgtgggtaccggcaacggcaatcacccagcgccctggcagcacgtgatcatgcagccactgtgggcccgaaacgtagggaataccctgctccagaaccgcctcaacgcagggattgccacgcgtcatggcattaccgataaccaccagatcgggcttgggatccagctgagtcggcgagtagccctgaatcagctcaatcccctgactttccaataacgtactcatcggcggatagacattatcgtccgatccagtcacctgatgtccctgtgcgcgggccagcatagccagtccgcccataaacgtgccgcaaatcccaagaatatgaatgcgcataaattttccattattgctcttaagtcagtggctattctaacgctcagattcctccagaagaaatggatttgcctatgatccgtccatatatttgggctaaactgcattcgcttctgtaaaagattttttataaatccgttactcatcctaggattcagggaacgtatcatgaaaacgttaggcgaatttattgttgaaaagcagcaagattttccacatgccacaggcgagcttactgcgctgctctcggcaattaaacttggtgctaagattattcatagggatatcaacaaggcaggtctggtagacattctcggtaccagcggcgttgaaaacgttcagggcgaagttcagatgaaacttgacctgtacgcgaacgaaaagcttaaggcagccatgaaggcgcgcggcgagattgccggtattgcgtcggaagaagaagacgaaattgttatcttcgaaggcgaacgcgccaataatgccaaatatgtcattctgatggacccactcgatggctcatcaaacatcgacgttaacgtgtctgtcggcaccattttctcgatttatcgccgtacttctcctctaggtcagccggttaccgaagcagatttcctgcaaccgggcagccagcaggttgctgcaggttatgtggtttatggttcttcaaccatgctggtttacaccacgggtgcaggcgttcatgcttttacctatgacccttctctgggcgtattctgcctctctcacgagaaagtcatgttcccgcaaaagggctacatgtactccattaatgaaggcaactacatcaaattcccacgtggtgtgaaaaagtacatcaagtactgtcaggagcaggacgaagcgtccggtcgcccttacacttcacgttacatcggctcactggcggcagacttccaccgcaacctgctgaaaggcggcatttacatttatccaagcaccgcgagtcaccctcagggcaagctgcgtctgctgtatgagtgtaaccctatggccttcctcgcggagcaggcaggcggcaaagccagcgacggtaaaggccgtattctggatatcgttccgaccaaactgcacgaacgcgcaccgttcttcgttggcaacagcgatatggtcgaagacgccgaacgttttatcaaacagttccctgacgaataaaaacccctacagggctgtttgctaacttacttttagtacccaaattctggggtggcatcgcgccaccccgcttcattttaggaaaaaacggtccaggaaaaggcaggaattcctgtcggagttggctataatgtccggcattccatttctggttcaataaaggaaaccaacaatgagcttaattaatgtaccggctggcaaagatatgccagaagatatctatgttgttatcgaaattccggccaatgccgacccaatcaaatatgaagtagacaaagataccggtgcactttttgttgaccgtttcatgtcaaccgcaatgttctacccgtgcaactacggttacatcaaccataccctgtctcttgacggtgacccggttgacgttctggttccaaccccatacccactgcagcctggttcagtaatccgctgccgtccggttggcgttctgaaaatgactgacgaatctggcgaagatgcgaaagttgttgcggttccacacaccaagctgagcaaagaatacgatcacattaaagatgtgaacgacctgccagagctgctgcgtggccaaatcacccacttcttcgagcaatacaaagcgctggagaaaggcaaatgggttaaagttgacggctgggataacgcagaagcagcgaaagctgagattgtgtcctcattcgagcgtgctaaagcgaaataaggcctgcgcctgttttgttttatcgcaaaaaaaacaccgcccattgggcggtgtttttttactgactcagacgacctttattttattctcacttctcttcttccgcacgtttgacccaatccccaccctcaatacgttccatgccttccagagaacgaatatacaggtagatccaggcactgccgtacggcgtagagattagctctcgacggtaatcttttgtgttacttttcagttcgtcaagctcagccatgatggatgagttgatgcggtaaacttcgcagtagatcttcccttctccggggattgctgccggatagtgccccagatcatacagggcatagccgtcaagctcgtggtcacccaaccactgagcgtttgtcatccagtgactattaccttgcttgcgtcgtaaactgccgtagacaattattcgcatggttaaaactcaaactgatagagcaaatctaatgcctggtcgatgccagacaccgcttccaaatacaatttaggcatcaaacgatagcgcagagtcagggtcgccagcgagtcaaaaatacccaccccgtatttaacctgcagcccagggaggacataaccactgaccactacctgagagctgtccccaacgccttgcgtatcaagcgacagattactgacgccaaatgcctcaccgattttacccacaagtttgccactttgtgcaacccccatgccgataagcattgaggtcatggcgctgctgtcggccccgaactgtccagcccctgtccacgtaacaaataggacagcgcttcctgctgcgacatggtcgggtcagagaaaacctccagcttaggcgcatctgcatcaccggtcacccgcacgcctgccaccacgtcattctcggtggaatccggattacggatagcctcgatgttgagcagcggctggtcagcagggcctgagaacagcagttggccttttctgacgattaaatcttgtccgtaggcatggaaccggcctgaagggatatcaatctggccgtttaatcccaacccacgtttgtcctgtacgaccttgagcgcgcctttcagacgagccttaagaccaaaggcatcaagtcgaacatcatctccgatgttcaccacaaggttagtgttgataggtattgaggtcgacgctggtgcgatcggctgacgctgatcgtttagcataacctcatcggacgataccccaaccgcgctctgcggaagttcctgaaccgtgatacgtgcccagggaatatcaaccctaccgttcaacgaaaacgcctgcggtgtagcatcaaacactagatcaggcgagacatcaagccgaaccatcggtggaaccgataccctcaccttatctcccttcgcagcgatgcgcgcacgccagttattggggtcattccagtccgcattgccgtttaacgccaactgaccgtgcggggtctgaatcacaccgtcgagcagcgaggacataccgttaaagttgatattaagattagcattggtgatgtcaaacggcatgaactgcgcatcgatatcgacattagtcagcgcgagtttgccatagacctgcggtttttgagcgttacccccacgcgcagattggcgttaaggatccccgaggccttctcgccgtccatcagcgccggctgaagcagtgccatcgagatacgggtcaggttgacgttgccgctcagattacgtcggcccatcgggtccgcgatttgaagattaccgtcgagctgcccgttgttggcaatcttgatcatccagtcaagattcgcgcgaccgttttgcagcccggcgtttacgttgagcgtatcaaaggcaaccggcagagggttaccctgcaccagctgctgtaccttaacgcctttacccaccagtgacacactcgcctgcggcaatccccctgcgctttccacgcgacgttagccttgccgctaaactgtcctgcaagctgggtatcatcggtcaggaaaggtttgagcatcgccaaatcgaaacgattgaggacaatgctggcctgtccgctggtgcccgcgtcgagggtagtcggcacgcagacgtcggcgttcgggttctgccagcagtgggggccaacggtgacgcgctgttcggtgttgaaataggtcagcgcaatcggccgcgtcagacgccagtcacctaccggggtattgaacaacgtattgctgatgttgcccttccattgctgtgtcttgcggtcgaagctgccgttcacggccagatgtccccgaccggcttaccggtaatattcaggttgagctgatgctgcttctcattacccttggcatccaacgtgatgtcgctgatgtccagcgcatcctgcttcagctgctgaaccttcaccgccagcgtgccctgaatctggtcgctcgaggtcacattgcccttgatgctcacccggttcacgctcatcgcctgccagcgtacattgctggctgtcaggtcggccagcagctgaggtgccttgaggtcaccacgtacctgcaccaggcctttaactacgccgccgagccccggcagcgcgccgtcaagatgtggcgcatcgatgttggcatccagcgcccatttgtcggcgagtttacctttaacatcgagattgttgcggcccagctcaagatgaagctgtggaatatcccactggccgtagctattaccgcgcagattaccgcgcgccttgaccagattctttttaacgttgccgtccagctccagcgtcggtacctgcaactgccacgtcccgccatagagactgccgcgcatggcaattttaccggccaacctggctggccactctggccattgtttcgcggtgtcgatattgcttagcgtcagctgtgtgttccagctcaccgccttgctccagtcaaccacgccgctgaggtcggtattgccctgtagggccgccaggcgcatcagcttgagcttgaactgctcaaggttaccggtgccgtcgagcgttaacgatgccgggggcagctgctcgccggtgaagctcgaccgcagcgacagcgcatagtcggtcgccttgccgctgaacttcatattgaagccttttatctgatactgcggggtaccggtcagcggccattgtagggcctcactttgcagggtgaggtccagaggcagtcccacctccgccagttcggtttgtagcgccaactgagcacgcaccggcccagagagattcacaccaaccttcagttgcttacgcagctcacccccacggccagtttcaccttctcacctttcagcgggtcgatgttcactgcggtattgacggtcatattcaccggccagctgtcggtcaattcagcctgaccgataccatctatggatccctgcggtgaacgcacctcgagtttatccagtctaacccgctgattttcagtggtaaatttcaacaacagacgattgaccagcaggtcggtatcgccggtcagacgcaggttttcgccggtaatctgctggattgtcaggtccagcggcagtgtaaagtccggcagattcggtaacagcggcttgtcaaatatcgccttcagcgtatcgccaatcggtggctccggcgtggcaggcttcggcgcttctgccggtttgccggtgaccttttcactcaccttggcgacagccttgtccgtcgcttcctgcaccaccggcggcaacggatgctgtggcgtctttggcaacgccaccagcaaaccgttgatctgggttggcagcatcgttagcgcacggcctttccactcgataccggtgcggaattcggctagcgataccgtctcgtcgtcaatagcgacgctgacgttgttaagcgtgagtagacgtagcctgatgggataaggcgtgctgaggttggtcagcggctcgctggactcgggctccgtcttcgttgacggcgtcatctcgttggtttttaccaccacgctgacgtcctgcgcccgcacggcattgatgcaaagctggctgtgacgcaagcacgacaagtcgaccgacaggtggaactcgccggccttcacgtcgacgcccggcattttatattccacacctttcagcgtcagactccgccagccaccgtcaacgttggcgatggataatcccggcacaaagcgctgcgcgccgttgagcaccagatgcaagccggtttgggtgccgaccagaaacgcaacggcacccatcagcagcagtaaaataatcagaaatgccaggcagatctttttaaacaaactcataattctggacccaggccgatgtaaaattgcacgtcatgattggttggattgcctactggcgtcgcgatatccaacttaaccgggccaataggtgacgcccagcgcacgcccacaccggccccggttttgaaatcgcttttggagatgtcattgaccgcttcaccgctgtcgacgaacaccgcaccccaccattttccggtgacgttatactggtattccaccgagccggtcgccattttagaggccccgtcagcttgtcgtcgctgtctctcggcgagatggactcatatttatagccgcgaatgctgcgatcgcccccggcaaagaagcgcagcgacggcggcactttctcgaaatcgttagtctcaatccagccaacgttgcccctaaacacgaaacggtttcggtcgcctaacatacggatccagacgttttgcgcctgaataatcgcaaagtcgatatcagagccccaggcggtatcggaaacgtcgagagagtagcgctgcgaatcaccccaggttggcatcaggccaccgcgtgagcgggtacggctgagcgtgacgcccggatagataagcatggtggtatcggtaacagtaccctgggtaaagtggtcaagactccagcgcaggttgacggaacgttgccagccactgttgctgtcccagtagcgcgctacggtggcggtgcttgagtcagacttggtgtcgttgagatcgatacgcttaaagccgccaccgagggtgtaatactgctgaagcggatctttaagcagtgggatcttataggtgagatccaaggtctgctctggtgcagaaaggctgatcgaactctcaaggctctgcccacggtcgttcagccagggtttcttccagttggccttcacgcgtgggccgacgtcggtcgcataaccgcccccaattcaagggtattacgcgtgcgcggcgtcaccactgcgttcagcggcagcgtcttgctggctttcacctctttactgtcgaattcgggagacaccaccaccgagttaaaccagccggtggcggccaaacgacggttcagctcggcgagctgcgcggaactgtaatagtcgccctgatgaaagggcaccacgttttgcagataatcttcgcggatctgcgaaccgttgaatatcaccttaccgaagcgatagcgctgtccgctgtcgaaatcaatgtcccaaaaggcctgatacttgtcttcaatcacgccaagctggcttttacgcatgttggcgtcaaaatagcctttacgcagcgcgaggccgctcagcgcacttttgaagccgtcgtaggtgccgtgattgaggatggtaccgttagccggcactttggtcttcttaagtgcttcaaattcggtatcgtctttcgcctgcccttcgataaccacctgggtgccggcgattttaaccggcgtgcctgcggataccttggcaatcagaaccggacgacccggcggtggcgtctggacaaagttgaagtcgatggtgggctgataatagcccaaaggacgcagcccaagctttatcgcatcgctgactcttgcgcgaaaacgtccgtcggcagacacctcatcactcccaatggaagaaaggcgcacgcgtacgtttttttcgagatccccactcagtccttccaactgaagccgcactttcgcagcgtaggataacggggtgccagcagtacggctaacaaacaaagttcacggtatcgtggcacaagctctcctgctatgtttcattatcctggtaaaatatctatcgaaatcgttgcaattatacgatgtgcataaggtgctattgtgtgcaaagtcagttgcagatacaaccaacaaacctgattgaataatattagtggagtctttccgtggttcaactctccgataaaacacaggcaattagcaaagaagaagcgctgcctggccgcactaccccgatgccggtcgcgacacttcacgcggttaacggccattcgatgacccacgtgcctgacaacatgaacgtcgccatttttgcgatgggctgcttctggggcgtcgaacgccttttttggcagttggacggcgtctacagcacggccgccggctactcgggtggttttacgccaaatccgacctaccgcgaagtgtgcagcggcctcaccggccatgcagaaggggtacgcgtggtcttcgacccgtcgatcgtgagctatgaacaactgctgcaaaccttctgggaaaaccacgacccggcgcaagggatgcgtcagggcggcgacatcggcacgcagtaccgctctgccctgtatgtcctcagcaaggagcagcaagacgccgcacaggccagctttgcgcgttttcaggacgccatgcgggcctctggagatgtacgccatatcaccaccgagataagcgaagcgctgcccttctactatgcggaagacgaccaccagcagtacctgttcaagaatcccgaaggctactgtgggctaggcggcatcggcgtttgccttcctccgcagttgaccccttaaaacgcctatagattcagcagtggcgattacatcattgccactgctatactatccgggctgcattcgcggcccggtaattacgtttcttgctgttatcttggcttttatcaccttaaagtgatttttctattaacaaaaaccaaacggattacctttccctgtcggccttaatgccggtgttaaacggatagattatgttaaacagtattttactgattcttttactcatcgcgatcagtgcattcttctccttatcggagatatcgctggccgcttcacgcaaaatcaaacttaaacttttagcagatgaaggaaacatcaacgccgctcgcgtacttaaactacaagaaaccccggcctgttctttaccgtagtacaaattggacttaacgccgtcgccatcctcggtggtatcgtcggcgacgccgcattctccccggcatttcaggtattttttggtaaattcctgtctcccgagctcgccgatcaggtcagcttcatctgttccttcgtgttggtcaccagcctgtttattctgtttgctgacttgactccgaagcgcatcggtatgatttcacccgagattgttgccgttcggatagtcaacccgatgcgtttctgcctgctcgtgtgccgaccaatggtctggttcttcaacggcctggcaaaccttatcttccgtctgttcaagctgcctaccgtgcgtaatgacgacattacctcggacgatatctatgccgtggtggaagccggtgcgctggccggtgtactgcgtaagcaggaacacgagctgattgaaaacgtatttgagcttgaatcacgtaccgtaccgtcgtcgatgacctcgcgtgaaagcgtgatttacttcgacctgcgcgaaagcgaagagagcatcaaggacaaaatatccactcatccgcactccaaattcctggtctgtgacggacaaatcgatcaggtagtcggctatgtcgactcaaaagacctgctgaaccgcgtactgggtaatcagagcttgatgctgagcagcggcgtgcagattcgttcagcgctgattgtccccgacaccctgacgctgtccgaagcactggaaagctttaaaacggcaggtgaagacttcgcagttattcttaacgagtacgcgctggtggttgggatcatcacccttaacgacgtgatgaccaccctgatgggtgacctggtaggtcagggtatggaagagcagattgttgcccgtgacgagaactcatggcttatcgagggcggtacgccaatcgaagacgtgatgcgcgtgctgcatatcgaagacttcccgcagtccggcaactatgaaaccatcggcggcttcatgatgtttatgctgcgtaaaattcctaagcgcaccgactttgtgaaattctccggcttcaagtttgaagtggttgatattgacagttataaaatcgatcagttgctggtcacgcgcattagcgataaaccggtcgcttctctgctgccgaaaactgccgaagattcaccagcataatattggcggaggttgtttgcattatcagcaaccttcgaccacgcccaataaaaaaggccgcgatttaattgcggccttttttattcaacgtaaaagctatttagcataaatgctctattccatagaaagctgtattagcgtttacgcttcgagctgcagatgattaacctgcttgttcacctcagacatcacgctgaagtggcgcttgtcgcgaatttttggcaacaggatcttgccttggtcaaactcaaaagccccgacgtctttgatatacagacggcctctgaacaacgttttcacgtatttcgccacaatcagtgggttataacgctggaaaatcctcattttttttcactttcctccctttaagtatctctcttcccggacgggtaattgtttaaacatcgtccgagtcctactgctattacactgaatagacctaaaagatagcattcagttcccatccaaccagtctaattcactacttttacacaggttgacgatactgaagttctctttcaaaacgctgtgcagtatatcccttcaatatgtaccgaatatgacagcacattaagttttacctatattacagcccgagactatcagacaaaatccaaatttctgctaaggacagcacattgttgacattccaacaggacagaccacttcaaacaatcctatgcttaagcctttccgtgacctgacctgacctttctcaggagaacacatgattgttaatcgtttgttaattatagcctgcctgtttgcgccatttatggcgtcagcccacattttagagatagggagccgtgttccagccgttggcgttgaagataaaggagaacttatctacagcaacggcgagttcagctacagcaactggaacagcgccaaactgccgggcaaggtgcgcatcgtgcagcatatggcgggaaggaccagcgccaaggcgatgaacgcctcgcttatcgacgctatccgtcaggataatctgccgcgtgaccgctaccagaccaccactatcattaacaccgatgatgcgattatgggcaccggcatgtttgtgcgcagcagcatcgaaagcggcaagaaagagtttccatggtcgcaaattgtggtcgacagcaacggcgcagtgttgaaagcctggaggctcgaaagcaaaagttcggcgattatcgtgctagataagggcggtgtggtgagatatgcccaagagggtgcgctgtcgccagaggaagtgcataaggtgattgagctagtgaatcagttagtgaaggagtaaagccacctcgtggcgctttactccccttttaatcaggccggcttaaaacagcgagacgcgaaatcctgggttcaggaacgattcacgcggtgtataggtcagcgtctggccctgccagtctgtgacggtcgcaccggcggcgctggctacggcgtggccagcggccgtgtcccagaccgaggtaggcccgaagcgcggataaagctgtgccgatccttcggcaaccagacagaacttcagcgaagaaccgatagtcaccgtctgatgttcacccaactgcgacagatagtcctgcagttcctgatcactgctgtgagaacggctcaccaccaccagcggcgggtgagcttcgcgggcggtaatttcaaccctatctccgttttcttccttccatgccttaccgtctgccgccgcgtacaatacgccggtaacgggcacgtaaaccacgccaaggaccggaagcccgttctcaatcagcgcgatgttaaccgtaaattcaccgttgcgtttaaggaactccttggtgccgtccagcggatcgaccagccagaaacgcgtccagttctggcgcaccgcccacgacggaggatcttcttcggaaagcagtggcgtttgtgggtcgagagcgagaagtcctttcttgataacgttgtgcgccgcgatatcggctgccgttaccggcgagtcgtcatttttctgccgcgcattcagcggttgctcgccgtcatagactttcataatcgcgtcgcctgcgtcgcgcgcgagctggcaaatttgttccaacatcattcacctcagttattctttaatattcttaccctatcaataaagcctagttttttttggcgggaatagctatcccgtatttgtattatgtaatcctctgacggagccagtgccatgtttaagcatcacctgagactttctacgcttgcccttctcgttgccgccggtacggccaacgcggtaacggtggatttacgcatcatggaaaccaccgatctgcacagcaatatgatggacttcgattactacaaagataaacccaccgacaagtttggattagtgcgtaccgccagcctgattgaggcggcgcgcgcagaggtcaaaaactcggtgctggttgataacggtgacatcattcagggcagtccgctcggtgattacatggcggccaaaggcctcaaaaccggcgagattcatccggtttacaaggccatgaatacgctggactatgcggtcggcaatctggggaatcacgagttcaactacggtctggactatcttcacaaggcgctggcaggggccaggttcccgtacgttaatgctaacgtgattgacgacaaaacgggcaagccactgttcacgccgtttatcattatcgacaaacaggtcaccgacagcgaggggaaaacccataccttgcgcatcggttacatcggatttgtgcctccgcagattatggtctgggacaaggccaacctgcagggcaaggtgaccgttgccgatatcaccgagaccgccaaaaaatggctgcccgagatgcgtaaacagggtgccgacattattgtcgccattccgcactcaggcctttccgccgaaccttacaaaactctcgccgagaactcggtctactatctcagccaggtcaaaggcatcgatgccatcatgtttggtcacgcacatgcggtgtttccgagcgatgaattcgccaatatcaaaggcgcagatattaaacagggcaccctcaacggcgttccggcggtgatgccgggcatgtggggagatcaccttggcgtggtggatctggtattaagcaacgacgcaggtggctggaaggtgacccacgccaaagcggaagcccggcccatcttcgacaaaatcaataaaaagtcgctggcggcagaagatcctaaactgctgaaagtgctggcagcggatcatgacgctacccgcgagtttgtcagccagccgatcggtaagtcgaccgctaacatgtacagctatttgtcgctgatccaggacgatcccaccgtacagattgtgaataacgcgcaaaaggcctacacagaacactttattcagggcgatcctgatctggccgatctacccgttctctcggcggctgcgccattcaaggccggtggccgtaaaaacgatcctgcaagcttcgtcgaggttgagaaaggtccgctgaccttccgtaacgccgcggatctctatttgtatccgaatacgctggtggtcatgaaagtgaccgggcaggaggtcaaagactggctggagtgttcagcaggtcaatacaaccagattgacgtcaacagcagcaagccgcagtcgcttatcaactgggacggcttccgcacctataatttcgacgtcatcgacggcgtcgattatcagatagacgttacgcagcccgcacgcttcgacggcgaatgcaatctcatcaacaagaatgccgaacgcatcaagaatctgacctatcagggcaagccgatacgttccgatgcggtatttttggtcgcgaccaacaactatcgcgcctacggcggtaaatttgccggtaccggcgacaaacatatcgctttcgcttcacccgacgaaaaccgcgcggtgctggccgcctatattagcgctgaaaccaaaaaacacggtgcggtaacgccaagcgcagacaacaactggcgtctggctcccatcaagacaaaactgccgctggatattcgctttgagacgtcgccggacaccaaagccgccgagttcatcaagacccaggcccagtatccggtgacgcgaaaaggcaccgacgccgtaggcttcgccatctaccaaataaacctgcaaacccaaggctcctaagcccgattgcggccaaaaaaaggcgccctggggcgccttttttaaattctgtcgatcgcggggcgattacaggatttccagcagctcaacttcgaaagtcagtgcgctgaatggcgggatagatgcgccggcaccacgctcgccataagccaggttgtgaggaatgtacagctcccacttagaacctactggcatcagggtcagagcttcgatccagccagcgataacgccgtttaccgggaactctgctggctcgccgcgctgcacggagctgtcgaatacggtaccgtcgatcagtttaccggtatagtgaacgcgaacacgatcctgacgacctgggataggaccttcgccctgcgttatcacggagaattgcagaccagactcggtgctggtcacgccttcgcgctgtgcgttggcagccaggaattcctgaccttcaacggccaacgcttcctgacgctgacgacgaacggcatcggcacgctcgtgaacttcgcgcagtgcacgatgaaccacgtcaacgggcacagcaggggtattcccttccagcgcatcgcgtaaacctgcaagaagtgcatcaggctccaggccttctaaaccagattcctgcagctgttgaccgacctgcaagccgataccgtaacttgcctgcgcttcaacgctgtcaaatgaaggggttgtcatggaatttcctttaatcataaaaagtcgaagacgcagcataacagcgcaggacttttgggtaaaatgttacgataaaattcgaggtacaacgccagatttcgagtgattaaggggatatcctcgaatgcagttaaacagctatacttaggcccattaacacgctgtatcttttacgtctgattttattggcattacgtgcaacaagagaggttgtcatgggcaaatacccgcccaggagaaggaaggccacccgcatttatcaaccgatgttgagatcctggatttcgattatgcaaaagccgttgcagaagaagaaacccgagacggaaacagaggcagacatcgcgcaggatgaggccgttgaagccaacgcgattgagcgcccggtaatgaagccaagagcgcctacgctgtttaacaagatttggcatctcagtgatgattttcactggatggagccgctgccctatttccaccgccgctggattattgtcagcgttatcgtggtgctgcttgccttgctctggccttattcgccggagaatacctatgcgccttccgatcaaccgacctctattccgatgcaggccgatttacgcaacgaacagggccgctctacgcagatgcagcctgacgattcgtctcagccggttgctcagaatcagggcagttggagaaactatcagattcaacaggggcagacgctggcacagctgttccgcgacaataatctgatggtcaacgacgtctttgcgatggcacaggtggaggggaacgacaagccgctgagcaacctgcatgccggtcagcaggtgagaattcaggtcaacgcacagggtgtggtgaccgcacttcaggtgaccaacgatcagaacaataccgtcaccttcagccgccagtcagacggtagctatcgacgtctgcgttaatcaaacgcgccctcctcgcatcgccgtataaaacacggttttttaaaatgcaaaacgccggcacaaggccggcgttctgacggattactaaagcgaatattacgcttctgcaaccacaactacagtcagcttagcgaagacatcgctgtgaacctggaagtccacttcgtgttcgcccagagtgcgcagaacgccttctggcagacgaacttcgctcttagcaacctgaacaccggccgcagttactgcgtcagcgatgtcacgggtgccaacagagccgaacagtttaccttcgtcgcctgctttagacgcgatggtaacggtgcccagttcgttgatgctgtttgcgcgagcttcagcggcgcccagaacgtcagccagtttggcttccagttctgcacgacgtgcttcgaaatactcaacgtttttcttggtagcaggtactgctttgccctgtggtaccaggaagttacgagcgtagcccgctttaacgttaacttgatcacccaggctgcccaggtttgctactttatcaagcagaataacttgcattacctaatcctctctagtcgttaatggactgcggccgattactgatgacgatcagtgtacggcagcaaagacaggtagcgtgcgcgcttgatacaacgagcgagctgacgctggtattttgcacgagtaccggtaatacggctcgggacaattttaccactttcggtaatgtagtttttcagcgtagcgatatctttgtaatcgatctcaacaacgccttccgcggtgaaacggcagaacttgcgacgacggaaataacgtgccattaggctagtctccagaatctatcaattcaatctgctcggcatgtaacaccaccttgttgagcccattgcgaccttgatggcagctaatgaatccagtgacggtgagttgcgtgccgaccgttatactgtgagttaaaacttgtgactgatgtccgctaacaaccacaggcattctgcaccatgcttgtcggctaaatccggcttcctgctgctgtgatctgtgctctagcacaaactgacagtgaggaatgcccgatggactgactttacgaatgggggtcttgcacactgtgccagacaacaccaggcgattagtcgtcacaaaaattactcttcagaatccccagcttcagaatcatcattggcttcggcgaaatcttcacgacgctcacggcgttcgtctttcgctttaaccattggtgaagcttcagttaccgcgtgtttagtacgcataaccatgctacggataacggcgtcgttgaagcggaagttagtttccagctcatcgatcgcttcctgcggagcttcaacgttcagcagaacgtagtgagctttgtgcagtttgttgatcggataagccagctgacggcggccccagtcttccagacggtgaatctgaccagcagcgttagtgattacagcactgtaacgctcgatcatgcccggaacctgttcgctctggtcagggtggaccataaaaacgatttcgtaatgacgcatagaattgctccttacggattattcagcctcctgtcagggtcagccgtggcccatggaagcaaggaacgtgttatgtgtacggctgaaaaaatgacgcgcaattatatgcccggggaataataaactcaaggacccaggctgattaatttttcgacgtcgtttgctcagccgttctggcggcatttacaggtgggaagtaaagaattcggtggttcgattggcagcgtaaaccgtgaccttgtgcgtggcctccggttcgctgataaaggtcagattccttgcttgcccggcgtgctccagggcgtgcttcagccgggtgctttcggcaaacggcaccaggtcgtccttctcgccgtgccacaccagtagcggcttgctgccgacctgctcgattttatcgctaacgtcgagacttagcagctgcgccgtttgccgttcgaactcatcgcgagaccgcccgctctcgtcgccatacgatgggaacaaatggtcggaaagcgtgacgaaataaccggagcccatcaggttggccgcggccttcacccagggaaagtgcaccagtgcggccatcgtggtcatgccgcccatcgacacgccgcccacgccaaggcgctgctcgtcggccagacctcgtgccacaaaggtctccttaagcaaggctaaatcgttgacgttgttttgcaggatgcgccagaaattattgaacaacacgcgcgagtcaggttcggcgcgagcaccgtgcatcagcgcatccggcagaatgacgcgataaccggccttcgcgagattgtagccaaagtaagcgtagatctctttcgacgaggtgaatccgtgatagaaaaataccgttggcagtttctgatgatattgcccggcgggaacggcgtggataatctgaatcccctcgacgttttcctcatgcatttcaaccatctctcgctccttagatttgcagccctctcagggtaaggttatcgctatccattttatctgtccgtgaaaatgccaccacaatcttttggctatgttttataaccacactgcggggtataaaaacaaaatgagccttagaaagtcaaaatgaaacaatatcgcactcgctcagatgaatgggcaggcgctacactgaaacaacgacttaaggggataaattcaatgaaaatcagcctgccgattgttaagcgctgcttcggggcactggtcctgctcagcgcattgagcgcctgtagcgtactgaaaaccacgccagtcgcgccgcctccaccgaccagcaaggcgcaggaagtggtacgggcacaaaccactacgctgaccaagataggcaacgtgacagccaacgtcatcggcagtccgatggacgtggagcgcgccattcagcacaaggcggatgccgccggcgcgcactattatctgattctgctaataagcgacaccattatgccgggccgctggtattccgaggctattctctacaaatagcctactgagcgcctattgcccgctcgagaagctgctggcaaaggcgttcatcaatctgcgtatcgccgcgttcgtcgagcgtgaggcggcaccaggcatcggccagcggcggagaggaaaactccagcatctcggccgccgcgtagagattgaagagctgactggcgatcgctcgcccctgcgcctcgtctccgcgtttgagccgctgctgaaattgacgcgccgccttgtcgaacagacggttctgcccgcgcacctgatacagccgctgctggacctcttctgtcgccagcggcattttcttcaggctgcgcagcacgtcgaggcacatcacgttacccgaaccttcccagatgctgttcaccggcatctcgcggtacaggcgcggcagctcgctctcttcgcagtaccctatgcctcccagcacctccatcgcctcagcgacaaagggaatgccctgacgacagacctcaaacttggcggctggcgttagcagacggcttatgacctgctcgcgcccgtcggcaacgttttcccgggcgtgtgcgagacgaaacagcagcgcggtttgcccctcaaggcgcagcgccatccggcttagcacctgacgcatcagcggctgttctatcaagggtttaccaaatacctggcgctggaaggcatgatagagcgcgaccgaaaatgctcgccgcatcataccgtggctgccgagggcgcagtcgaagcgcgtgtggccgcccattttaaggatatggcgaacgccatcgccctcttcgcctagcagccaacccacggcatcgaaaaactccacctcgctgctggcgttggagcgattacccagcttgtccttcagccgctgaatgcgcacgtgattacgttcaccgtcgggcaaaattcttggcaggaagaagcacgacagcccaccttccgtctgcgccagcaccagatgtgcgtcgctttgcggcaccgagaagaaccacttgtggcccactagccgataaggtttgcccggcccacgtccttcgatggccgtcgcggtagtggtgttgctcaagacatctgaaccgccctgtttttcggtcatgcccatacccatcagcagcccacgttttttatcaccaggcaacagatgggcgtcgtagcgatcggaaagcagcggcgtgagccaggctttgaattcagcggggagcgactgttgtaacagtggaatagcaccgtgggtcatggttatcggacacagcgtgcccgcctcaacctgggcatgcagcaggaaacgcgcggcgcgcgcgacgtaggaaccgatacgggcgtcctcctcccacgacagattgtgtactcgattcgccaccagcccctgcatcagcaggtgccaggccgggtgaaatcgcacgtcgtcgagcggctcgccggttggctcaaaacgcaataagtcggggggttggcattcgccagacggcccagctccagcgattcggcggacccgagctgctggcctagcgaggcaagcacatcgagatcccagaccgcatgctggcgggcaacggcttcacgtagcgccgtatcagagaggaataagttgctgttgcttaagggcttgggttgattaaacacccggtgagtttcccagttcatcgccacctccgtcatccatagcatcaggattcagtatgataaaaactgacgaatttaccgcagagtggatcacaaacaggggaaacgcccgcaaccggggaggttgcgggagaggaatcaggcgggacttagcctttcgctttcacggcacgctggcgtacggcttcgaacaggcaaacgccggtcgcgacggaaacgttcagtgaagacacggatccggccatcgggatgctgatcagctcgtcgcagtgttcgcgagtcagacgacgcatgccttcgccttcagcgcccatgaccagcgccatcggaccggtcattttgctctggaacaaggtatggtccgcttcaccggcagtgccgacgatccagacgttgtgctcttgcagcacacgcagcgtgcgcgcaaggttggtcacgttgatcaaagggacgttttcggccgcgccgctggcgactttcttcgccgtcgcgttcagcttggcagaacggtcacgaggaacgataacggcgtgcacacccgctgcatcggcagtacgcaggcacgcgccgaggttgtgagggtcagtcacgccgtccagcaccaacaggaacggtgattccaggctttcaagcagcgcaggaaggtcgttttcctgatactggcgaccttctttaacgcgtgcaacgatgccctgatggaccgcgccttcagacttgtcgtccagccactgacggcttgccacctgaataacgataccgctggcttcgagttcttcaacaagcggcttcagacgtttatcgtcacggcctttgaggatgaacacttccagaaaacgctggggatcgttgtcgagtaaggctttaacggagtgaataccgtaaataatttcgctcatgatgctctttaaaataatactttttatgaatacctcatgcgggaaaacgcgtgtccgcatgaggtagtgatgattggcggcgattctatcattgactgacgctggcatcagtcaataaatgcacaaatcaggattcggcctgttttttcttcgcacgcttggctttggtggccgcagcaattttctgggttttctcggaaggctttttggttttcttcggcttgccgtctttaccgacggcgctcgtcacctttgctgactcggacttgaccgccgccttcgcggtttcggccttgcctgttcggcgcgctttggccggcttttcgccctctttgcggaacgcgctatccggctcaaagttgacgtttttcttgccggtacgacgacggcccgcgttggcggcaccggtaggacgcatgctgcgctcgccgcctttcttggcgcgatcgcgggccgttttaccttcaccgcgcggtttgcgggtgctggacaccagcgcgaaatcgattttacgctcgtccatgtggacggcctcaacgcgaatttcgaccgtgtcaccgaggcgataaacgctgcccgaagactcacccaccagacgctgaccaatattatcgtaacgataatagtcgttatccagtgacgatacgtgcaccagtccgtcgatgaacagatcgctaaggcgcacgaagaatccaaagcccgtcacgctggagataacgccggtgaagacttcacccacgtggtcctgcatgaagtcacacttaagccagtccgcgacgttgcgggtcgcttcgtcggcgcggcgttcggccatcgaacagtgatcgcccagcatcaccatttcttcgtaatcgctgtggtagccgccggttggcgtccagcgatccttcagcgtgccgtgctctttcgccagcacgtatttaatggcacggtgcagcgcaaggtcaggataacggcggattggcgaggtgaagtgaccgtaagaggtcaacgccagaccaaagtgtccacggttttccggatcgtaaatcgcctgcttcatcgagcgcagcagcatggtttgcagcatctcgcggtcaggacgatctttgagctgttccatgatgtcagcgtagtctttcggctcaggtttcatcccccgcccatggtcaggcttagctcggacaatacgcttttcagcgccgaaatatggtcgtcgcttggacggtcatgaacgcggaacagcgccggctcgttatgtttctcaacaaaacgtgccgcagagatgttggccatgatcatacattcttcgataagcttgtgcgcatcgttacgcacggtcgcttccacgcgctcaatgcggcgttcagcgttgaagataaacttggcttcttcggtttcgaaggcaatacctccgcgttcggcgcgcgcctgatccagcactttatacatgttgtgcagttcgaccagatgcttaaccagcggcgagtactgctcacgcagctctttgtcgccttcgatgatgtgccagaccttggtgtaggtcaaacgtgcgtgcgagctcatcaccgcttcgtagaacttggaactggtcagtttaccggtcgcggagatagtcatctcacagaccatacacagcctgtcaacctgcgggttgagggagcagaggccgttcgacagcacttccggcagcataggcacaacctgcgacgggaagtagaccgaagtggcacggctgcgtgcttcgtcatcgagcgcggtgcccggacgaacgtaatagctcacgtcggcaatcgccacccacagacgccaaccgccaccgcgcttcttctcacagtaaacggcatcatcgaagtctcgggcatcttcgccatcgatggtgaccagcggcaaattgcgcagatcaacacggccttttttggcctcttcaggcacctgttcgctcaggcctgcaacctgtttctcaacctgtggcggccaagtgtgtgggatttcatgggtgcgcagcgcgatatccaccgccatgctggttcccattttgtcacctaacacttcaacgattttaccgaccgccttggtacggcgcgttggacgctgcgtcagttcgaccaccaccatgtaacccatgcgtgcgccgctgacggcgtcggccgggatcaggatgtcaaagctcagacggctgtcgtccggcaccacaaagcctgcgccagcgtcggtgaagtagcggcccacgatctgactggtctttggcaccaccactcgcactatgcgcgcttcgcgacggcctttacggtcagtaccgaccggctgagccagcaccacgtcaccgtggatgcacattttcatctgctcggcagacaggtaaacgtcgtcttttttcacgccttcaaggcgcaggaaaccgtaaccatcgcgatggccaataacggtacccttcaacaaatccagacgctcaggcagggcatagcattgacgacgagtgaagaccagctgaccgtcgcgttccatagcgcgcagtctgcggcgcagcgcttcaagctgctcctcacccgagagattcagttcattagccagctcttctcggctggcaggcgtttcgcgcttaccaaggtgttcgagaataaattcgcggctaggaataggcgattcgtatttttctgcttctcgttccaggaatggatcttgtgacatagcggttcctccgttgtcatcagcagtttgttgagagtctttcattcaacaagcaataatttgtagagttgagaattatctttgaccatgtcggccagcgtgtattgattcaactcatcaagaaagtgttctacggccgtatgcagcacctgctttaagcgacaagcaggggtgatgtggcaaaattctgccgaacaattaaccagggctaacggctccagctcgcggacgacgttacccaatagaatggtttcagccggtttacccagtctgatcccccgtttttaccgcgcattgccgtgaccagtcctgcccggcttagctgattaataattttcaccatatgattgcgcgagaccccataaacttcggtgacctcggaaatgctggtgagctgaccttctggcaacgacgccatatagatcaacgctctcaaaccataatcggtaaaactcgttaactgcacactcgcctctgggtacttttacccgttttattcgcatctatgatgacaatgtaatgcgtatatacccgttaacttatgaaagcccggtataagcaagattactctattgaatgggctgcccgccacaaagtttgtctttaaatcaaacagacgctgaaattcgaagcataacttgagcgatttggcgttggtggcaacagaaaaagaaaaccgggcgtcgtggcccggttttgcgtttcacaataatcgatgacgattaggcgtcgaacgggtcgcgcaggatcatggtctcgctacgatccgggccggtagagatgatatcaaccggcacttcagtcagtgcttcgactcgtttgatgtaatcgcgagccgcctgcggcagtttatcgagctctttcacgccaaaggtggtttcgctccagcctggcatggtttcataaatgggctcgatcccttcccagttttcagcggctaacggcgtggtggtcacctctttgccgtccggcagacggtaagccacacacagtttgacctctttcaggccgtcaagcacatcaagcttggtcatgcagaagccagacagcgagtttatctgcactgcacgacgcacggcgacaatgtctagccagccgcagcgacggcggcgaccggtcgtcgcaccgaattcgttgccctgcttgcagagatattcgccgatatcgtcgaacagctcagtcgggaacggccctgcgccaacccgcgtcgagtaggccttgacgataccgagcacgtaatcgacgtggcgtgggcccatacctgagcccgtagcaacgccgcccgccgtggtatttgatgaggtcacatacggataggtgccatggtcgatgtctagcagcgtgccctgtgcgccctcaaacatgatgagttcgccctgcttgcgggccctgtccagaaggtcggagacgtcgacaaccatcgcggtcaggatgccagccactgccgttacatcattgagaacctgttggtaatcaaccgcatcgaccttgtaatagtgcaccagctggaagttgtgataatcaacaatctccttaagcttgtgggcgaaagtttccatgttgaacaaatcaccgacacgcagcgcgcgccgggctactttgtcttcataggctggaccaatcccgcgacccgtagtgccgatagccttcgcaccacgggctttctcacgcgccatatcgagtgcgacgtgataggaaaggataagcgggcaagcctcagaaataagcagacgctctcgaaccgggatccctcgcgcttcaagttcacccatctctttcatcaacgcgtccgggccagaaccacaccgttgccgatgatgctggtgacattttcacgcagaatgccggaaggaattaaatgaagaacggttttctcaccgttgataaccagcgtgtgaccggcattgtgaccgccctgatagcgcaccacatatttagcccgctcggtgagcaaatccacaatcttgcccttaccttcgtcaccccattgagtgcccagtacgacaacgttcttacccatcttgagaatcaccaggttgcttaaaaaagaatcctaacatcctctccccagcctttcagtagttttagccacccgctgggtgaaaaatgtccgtttcgtgcgacagctctcttgtcggggaaatccgccgtgaggatagcctcagtgaccagtatagcggctcaccatgaagaaaatgaccacgcctgccaccaccagcccgccgccaaaacggcgcagcagtccgtctggaagctgggtcatactttggatcatttttcgccacaccttgggaaacaccatcggtcccagcccttcaacaatcaacaccattcccacggccagccaaagactcacgttcatatttttactctaatttcctggaggagttatcgcctgcggctaaaaatttgcgccgggcagataaaacaaaaggcccgttatgggccttttgtgggatgacgtcaagacggtctgcgtcaattaaggtttactggtctttgccggcgttttcatgtagcggaagaaatcgtcgttaggactcattaccataacatcattaccgctgctgaagctctctctgtaagcctgtaggctacggataaaggcatagaagtcaggatcctgactgaacgcatcggcaaacagcttggctgcctgagcatccccttcaccgcgggtaatacgtgcctgacgctcggcttcagccaaagtacgggtcacttcgtaatcggcggtagcacgcagcttctcggcctcttcctgaccctgtgaacggtggcgacgagctaccgcttcacgctcggcgcgcatacgctggaagatggcatcagagacttcggtcggcaggttgatttgcttgatgcgaacatcaacaacttcgatacccagtgccgccatgctgttcgggttaaccgctggcaccttgccgttggtttcctgctcgacgcgcttggccgctgaagcaatagcgtcatcggcttcggtcgtcgcagcggccgcagcgtcatcgtcgtcggtaccctgattcagggcatcacgcacgtccagcgtcagacgaccgcgtgaatcggtcacgatgtctttgacgtcaagacgaccaatctctgagcgcagacggtcactgaatttacgtttcagcagcacctcggcctgtgacacatcaccaccgccggtagccaggtagtaacggctaaagtcgctgatacgccatttcaggtaagagtcgacgatcaggtctttcttttctttggtgacgaagcggtcggcctggttgtccatggtctggatgcgcgcatccagcgttttcacggactcaacgaaaggcaccttgaagtgcagacccggcgcatacaccaacggcttgttgtcgccgtcacgcagaaccttgccgaaacgcagcacgataccgcgctggccttcctgcaccacaaacagtgaagcgtagagcgccaccagcactacaacaacgacaagtaaaattgacttacgcattggttattctctccctacgcgaacggtgtcgtcacgctgtacatcggcacggcgctgatccatgacactgccagaagaacttgagctgctgttgctggcactgctgtttctactgctgctcgacggcgaaggaacctgtcgcaacgggatcatgctactcgcatcatcgccgctgttattggccgctgccgccgttttaccgcccagcagctggtccagaggcagcaccatcaggttgttgctcttatcgttgataagcaccttgcgggtgtgactcagcacgtcctgcatggtctcgatatacagacgctcgcgggtaatctccggcgcggctttatactccggcaacagctcggcgaagcgggcaacttcaccctgcgcttcaagcacggtacggtctttgtaagctttggcgttttcaagcagacgctgagcctgaccgttagcacgaggctgaacttcgttggcgtaggcttcggcttcacgaatatactgctgctcgttctcacgtgcagcaattgcatcatcgaatgcggccttcacttcctctggcggacgcgccgtctggaagttgacgtcctgcacggtaatccccatgtgataaggacggattgtctcttccagcacgcgctgtgtatcgctacgcaccgttgtacgaccttcggtcaggatcttgtccatggtgtatttaccgataacgccgcgcagcgcactgtcggtcgcctggctcaggctgtcgtcagcgttggccacgctaaacagataggcgcggggatcggtgacgcggtactgcacgttcatttcaacgcgcactacgttttcgtcagaggtcagcataatgccggaagccgcgagctcacgaacggattcgacgttgaccgcctgaacctgatcgataaaggtcggtttccagttcaggcccggctcaaccagatggctgaacttgccgaaacgggttaccacaccgcgctctgcttccttaatggtgtagaatccgctggcagcccagataaccacgacggcagccacggcaaggccgacgaatcgaccgttcatattcttctgcgggccggagggagtgccgttgccggaccctttaccgccgaaaccaccgagttttttactgagcttacggaagatatcatcaagatcgggagggccttgatcgcgcccgcccttattgttattaccaccagaattatttccaccagagttgccgctattgttgctgcttccccaggggtcgcggtcctgtccgttattaccgggctgattccacgccatgttatagctccattattctatgattggtgttcttcaggctctatatcagtcaagttatcccaggcatttttctcttcgaaatctaccgggaatccgttacgaacatattcgctcatagccggttcttgtttgcagaggcgacgccagtcaacaatgggcatacgcaccatcagaccgatactgccatcctcttcaatccattctttttcaatcgcctgaagctggtaaaaacggctacgaaggcgacccgcttccggtggcaaacacaattctacctgtgcaatttcacctgacagacgctccgttaatgcctgaaatagcaacgggataccttcacctgtcgcggccgataaccagaccctgattggcaaattctcttcgttgcggtcgatacgtgggacgaagttgtccaacatatctattttattcatcactaacagcgcaggaatgtcatctgcttcaatctctgccagcaccgtattcaccgcgtcgatgttttcctcaacgcgaatatccgctgcatcaatcacatgaattaacagagatgcctgtcgggtttcctgcaatgttgctttaaacgcagcaactaaatcatggggcaggtgacgaataaaccctacggtatctgccagtaccgtctctcctacgtcagcaaccataatgcgtcgcagcgttggatccagggtggcaaataattgatcggccacgtaaacgtcggcctcggtaattcggttaaacagcgtcgactttccggcgttggtatatcccaccagagaaaccgtcggaatgtcggcacgcactcttgaacgacgcccctgctcgcgctgtttggcgacgcgttcaaggcggtttaaaataagcgtgatgcggtcgcgcaggagtcgacggtcggtttcgagctgggtttccccaggaccgcgcgcaccaatcccaccgccctggcgttcaaggtgagtccagcctcgtaccagtcgggttgcaatatggcgtaactgtgccaattctacttgtagtttaccttcgtgagtacgggcgcgctgggcaaaaatatctagaataagtccggtacgatcgaccacgcggcattcgcacaaggcttccaggttacgttcctggccaggtgttaaagcgtgatcaaacaggattacagatgcgccagtagctttaacggcatctgcgatttcttgggcctttccttcaccgacaaagtatttagggtgtggagccttacggctaccagtgatgacttgcaacgcctcaacaccggcagaagagacaagcgattcaaattcgctcaggtcttccgtgtctttgtcttgcgagaaatagatatgaaccagtacggcctgctcaccggcttcataacggtcaaacaagcgtgtgacctctcaattgagaaataaaattcaacgaggggcacataagcggcaataaccccttatgaaccccttcgagattgaacagctgggcgccttattcggcgtcatcgccatcctgcggctgctgtggagcagacggtgcgctaccatgatgatagttattggtagtaccaccacctggattattactgtgatgagaaaccgggcgcgaaggaacaacggtggagatagcgtgtttatacaccatctggcttaccgtgtttttcaaaagaatcacaaactgatcgaaagactcaatctggccttgcagcttaataccattcaccaagtaaatagaaaccggaacacgttcgcgacgcaatgcgttcaggaacggatcttgcaaagattgccccttagccattctatcttttccttatttgtttgttgtttgtaactttgagcctacaagctcgaaaataaatcacataaaaaaatttgcgcgttgagtaccaatcaattgtacacaatcaaccaacctatgcactaacaacctgaattacacggcttaaggcttcgtcaggcttttctgaatcaagccattcaaccccttcccaacctcgtaaccatgtcatctggcgtttagccagctgccgtgtcgcacaaacaccacgataaaccatttcatcgtagtcgatttcaccagaaaaatatgaccacatctggcggtaaccgacacaacgaacggaaggcatgtccgtatgcaaatcaccccgagtgaaaagcgcttttgcttcggcctcaaatccgttcgaaaccatttggttaaagcgcaattcaatacgatcgtgcaacaattggcgactcgtaggtgcgatcgcaaattgatgtacccggtagggtaagctttcacccgaagttttaacgagttccgttaaagttttacccgaaatataaaaaacttccagtgctctggagagtctctgtggatcattcgggtgaattcgcattgccgataccggatcaatttcaatcaattttttgtgcagcgcttcccagccctgctccgtagcctgcgtctcaatgcgctcgcggactttcgcgtcggcctgaggcaggggagaaaggccctctaacagagccttgaaataaagcattgttccaccgaccaacaacggaattttcttacgtgccgttatttcctgcatctctcgcagcgcatcggcgcggaaatcggcggccgaataagattgcgcaggatcgaggatatcaatcagtcgatgaggtgctaacgcaagctcttcggcggttggttttgcggtaccgatgtccatgcccttgtagataagagcagaatcgacgctgataagttcaactggaagatgctggcgcagggccatcgccaaggcagttttgcccgaagccgtcggacccatgataaaaatagcgggaggtaatgctttgttttctgaatcagtcatgcttaaaagccgccaaggccggctgtaaatcaacgggttgcaagagtccggagggaggtgacttgaccagctgcgggcaaagtcgctcaacgtccgcgagtaattgtattgcttgtgaaaccgtccagacgtcatgctcactgccaatgctgcgggcaaaccacatagctaccgcatcaggagtgacctcctgcagaaccgcaatatagcctaacaggtcgggtatcaacttttgtaaattttgttggcgtaatggtaaaggcactgtgcgcaatgtcccacgctggtgctccaatagcatttcaataccaaagtgttgcaacagcgcctgatggtgcgtgaatgcgtcgcgctcttccttgcttagcgtcagtttaaccggaataagcagcggttgaggcttcaatccttcagaggtgggggtcagctgggccgttttcaaccatctttcggcgaccggcaacgataacagcataattttctgcccacgttcaataagagcaaaacttgcggcacagacggtcatcacgcggccaaagctttggctatgccctgcaagcacatcttcatgcccggcgggtctggccttctcgacgatggccgaggcttcaacggccttaaccgccgcaggcgtatcgtcgccaggcctcaacaattgctgataaagctcgccctgcggtttgctgtaggtattttcttcgctatagcgctgcacgggctcgcgcagatgcgcagaacgcgatgtctcagggaatatcggcttgccctcagacggcgctttgtaagacggttcctggcgcggcggcgtcgctctggccgagggtgcaggctgggaaaaatggttaatgcccgccgcctgacggttttccggctgccagcgtggctgctcttcgaccggctgctcggtattaagctgcaaatcgcccgcctgctgcaataccgccaccaccgcctgatagatgaaatcatgcaccagccgtgactgatggaaccgcacctcatgtttggccggatgcacgttgacgtcaacctgatgcggatccacatcaagatacaacacgtaagcgggctgctgatcgtctttgagcctgtcctgataagcctggcggatcgcatgatttatcaggcgatccttcatcatgcggttattgacgtagcagtactgcatctcggtcagactgcgcgaaccggcaggatcggcaacccagccgcggatcgccaaatcaccgtgacgccattccacctcaagggcgtgctcgacaaaagtggtactgcaaatgctcgccaggcgacgcgcgttctgcgagggatctttcaccgcgcgatattggcggaccagcttaccgttatggcttaggttaaacgcgacgtcgaaacgggccagcgcgatacgcctcaccacctcatcaatgtgcgtgaactcggttttttcggtgcgcatgaacttgcggcgagcggggtgttataaaataaatcgaggacttctacggtcgatccctgtggatgtgcggcgggttttaccgtcaccgccatgtcacgcccttcggcgtaagcctgccaggcttcgtcctgcgtggcggtgcgcgacgtcagcatcaaacgcgaaacggagctgatactggccagcgcctcaccgcgaaaaccgaggctgagaatcgcttcgagatcgtcaagcgagctgattttactggtggcgtgacgggccagcgccagcgcaagttcgtctttagcgatgccgcagccgttatcgcggatgcggataagcttcgcgccgccgcgatcgatatcgatatcgatacgcgtcgcaccggcgtcaagactgttttcgaccagctctttcactaccgatgcgggccgttcaacaacctcacctgccgctatctgatttgccagctgcggtggcagtacccgaatcggcatagccgctcctgtcatcttaagaagaatatcgcttacgtccgtttacgactgcggaatggtcagcgtctgcccaagctgcacgtcaccggatttcatatggtttgccgttctgatgtcgctcatgctgacaccgtacttcgaggcaatggccgacagcgtatcgccgcgcaccactttgtgccttgaaggtcgtttcgtcgcacgcgccgtcgtcactttagcggtagtgtttctcgacaccgccgaggtgcccgccggcactttcagacgctgtccgacccagacaccgtctttcttcagcttgttaagatcgcgcagtgcgctcatggtggttccataatgcaccgcaatgcccgtcagcgtttcaccgcgtttgacctgatgaatctgcgtcgcgccgcccagtgcggccgtggtttcaatcggccccggctggctcaaagagctgctgtccggtgccgaagcgttggagctagtgaccgacgttgcgctggctagcaacggtcggttttcgacctttgggccggtttgtaacggatgcgccaggaaataactgcgcaagccttcatagatggcatgggcaattttatcctgatacgcgctgcttccaagcagccgctccccgctaggattactgataaagccggtttctaccagcagcgaaggaatatccggtgaacgcaatactccaaggctggcgtgctctggcttggccttgtgcagtgcgccgactttgcgcaactgctgcaatactttaacggcaacgtcataacctacgcgctgcgagtggccgaactgcaagtcaagcaccgcctgactcaaataaggatccgacgcggtgttggccagcatatcgcccgcccgcctagcagctcggactgcttctcgtgctgctcaagccagttacccatttcgctgttggcgcgacggtttgaaagcacccagacagaggcaccattcgcgctgcggttaggtgccgcatcggcgtgaatggagaccagcaggttggcgccttttttacgcgccacgtcggaacggcccattaccgagatgaagtaatcgccatcgcgggtcaataccggtttaaacatcggatcacgcgccatctctgcctgcagtttgcgggcgatggcaatagtgacatttttctcttttagtccacctacgccctgtgcgccggggtcttgcccaccgtggcccgcatcgatggcgacgatgacctgattatccgaggtggttccgctggtacgtggcgtgagctgtgtgctcggccctggcgcagcggcgacccgcggactctggctgccgtcaaacggattaccgcgcggtggcggtggcgtgaccaagcggttccccggctgggcacgggtgatcattcccgaagaagaggtgcgctgtggcgcggcggcgctgagggtaaacaccacggtgtactgaccgccgtcctgctgcacctgggcattggttctgaccttttgcgtcagctcaaacaccagacgctgcgtcttggcatccgcaggcgtactcgcccgcacgcgtctaaccagattttggccgctaaaattcagcggtaaaccacgcatcacgcccgtttgcacgatatcgatgactacgcgttccgggctatgaagcgggaagaaggaatagtcaggcttgccatcaaagttgatggtaacggtggattgcgtactcccgttggaaacattgatgtttttcatacctgcgccaaaagcaggaacgaatgccgtaggtatcatcacggtaaccgtgagtaccaacatagccacgactcttttccaaaatctgttaacgcattgaatcattacagcattatccttgcttttgtagcatctgcagcagccggttacctgtctcggaaacggccttgatagtcgccaatcgtccctctggctgataggcgagagtcagttccagatcgggctcaggcaaaacgcccgcccctgttgaggccattccaccagacaaatcgcgtcttcggtaaagtagtcgcgtatgcccatgaactccagctcctccgggtcggccagacggtacaggtcaaaatgatagaccgccatcggatgaagctgataaggctcgaccagagtataggtcggacttttaacattgccgttatgaccgcgcgcctgcaggaacccacgactgaaggtcgtttttccagcccccagatcgccaaacagatggatgaccgtcgcaccggtgcaggcggcggctaaatcagccccaagtttcagggtggcgacttcatctggcaaaggtaagttaatttgattcattgggtagtttctatttttctaggtcagggttaaccgttgggctatccaggttaacaaatccgttgccagcatgccgcgagtgccctggcgttgagcgatgatatccgccgccgcgccgtgaaccacagttccggcacaggctgcatcatagaaagataacttctgagcgagcagaccgccaatgatgcctgacagaatgtcgcccatgccgccgctggccatccccgcattgccgacgtcggccagcgcggtctggccctcttcggtgccaatcagcgtgcctgccccttttaagaccaccaccccccatagcgatgggtaaggcgtcgtaaagaaagtaagcgatcgctttcgatttccttcacagtgcatcccaaaaggcgtgcggcttcaccgggatggggcgtcaagacgcgattttgccgtttctcagggctttttgccagcatgttaagcgcatctgcgtcccataacgcgggtttttgattttcggcgatacgtttgaaggcagattgcccccacgccttctggccaaggcccgggcctattaccaccgcactggcccattcgagtgcctcggtcagtgagtcgtcgttcagttcctgcaccatcagttcaggacgggcggtcagcagcggcgcaatattctctttgtgagtgagtactcgcaccattcctgcacctgcccgcaaagccgcttcggacgccatgcggatagcccccgcaaagccggtatcaccgccgaccagcaacagatgtccgtgttcgcccttgtgcgagcaaggccgacgcggctttagccactgccccagccgtgcagcgtcgagacgttgcagcagaggaagatggccactaagccagctttcgaggccgagcgtgtcacagcgcaactcacccacgtagtctcgggcctgtccggtgagcagcccaggtttaagggcaatgaaagtcacggtcagcgtggcatgaaccccttcaccggctgcggtgccggtttctgcggccagaccggagggaatatctagcgacaagacaggcgcatcatagtgattaatcgccttaatgaggcgcgtcatcggctctctgggtgcagatttcaggccggtaccgagcagcgcatcaaccaccagcgctctgccagaaggccacgccgaggtgatatcgccaatcgtgccaccggcgtcgagccagccctttcttgcctgttccgcctcatcgggcagcggtttatcgctgcttattgccaataacgtgacgtcaagacccgcgcctttggccaatcttgctacctcatagccgtcaccaccgttattaccgtggccacacaacaccagccagcgcgtggcgtgaggaaaggtcgaacgcgcatggcgaaatgcggccgcggcggcgcgctgcatcagcgtaaatagcgacaggccggtatcccgcgccgcctgtgcctccgcatctcgcaaccagtctgcagaatagacggagtatggtaaacttgccgggttccgtttttcaatttggttagtcatgacgcacctcctcgatctcgatcaattagcccaacatatcaagcaatggggccagtcgctaggcttccaacaggttggtatctgcgataccgacctctcggccgaagagccaaagctgcaagagtggcttgataaacaatatcatggagagatggattggatggcgcgccacggcatgatgcgcgcacgtccgcatgagcttttacccggcacgctgcgggtgataagcgtgcgcatgaactacctgcctgccaaggcggctttcgcaaaaacgttgaataatccaatgcttggctatgttagccgctatgcgttgggccgcgactatcacaaggttctgcgccagcgtctgaaaaagctgggagacatgatccagacttactgcaccgaagcgcagcccgattcagcgctgagctttcgcccttttgttgattccgcacctatcatggaacgtcctcttgctgagaaagccgggcttggttgggttggcaagcactcacttatattaaaccgtgagtcaggttcctggttcttcctgggcgaactgcttatcgacctccctctgccggtggataaacctcaggaagaacagtgtgggcgatgcgtggcctgtatcactacctgcccgaccggcgctattgtcgcgccctatcaggtcgatgcccgccgctgtatctcctatctgaccatcgagctcgaaggggccattcctgaagagttccgcccgctgatgggcaatcgtatctacggctgcgacgactgccagcttatttgcccctggaatcgctattctcagctgactgacgaagatgatttcagtccgcgcgctgcgctgcatgcgccgcagctggtcgaattgtttaactggaaagaagagaagtttctgcgcattaccgaaggctcgcctattcggcgtatcggacacctgcgctggctgcgaaatatttccgtcgccttgggtaacgctccctatgacgaaagcatcgttttggcgttagaaagcagaaaaggggaaaatagcatgctggatgaacatatcgagtgggctatcgcgcagcagttgaccaagcggagcgaacatcagatagaggtgcagtcttctcagaagaaacgactgattcgcgctgtggaaaaaggtttgccgagggacgcttaaaagaggcaattttctgtaaatgcgctagcgtctccgctgtgcataaaaataaaattgctttgccgatcaattgcaaaaaaagagcaagcgatcgccataacgttttgctattaattttattcattaaaaatcaataagttattttttaacaatatccacaggacaaataaagatcagtgcaaaaagtaaactaaatctgtggataactctgttcacagaattaattcaagtcatttttttaaacgacgaaaaaggccccaagagggcatggtgactggcttagtgatttgaagaagaaaattggagcgggaaacgagactcgaactcgcgaccccgaccttggcaaggtcgtgctctaccaactgagctattcccgcttaggagatgcaatgtgcatcggttgtaaatttcgtcttgtaaattctcttcgcctgaagagacatctacttttcgacaactacaacatttgaaaagtttggagcgggaaacgagactcgaactcgcgaccccgaccttggcaaggtcgtgctctaccaactgagctattcccgcgtcgcatggtgctactgttttctgtactgctatttttctttgataaaactttgaaagccaatcaaaaaaatttggagcgggaaacgagactcgaactcgcgaccccgaccttggcaaggtcgtgctctaccaactgagctattcccgctctgcgtactaacgaaattcttcatcggtacggggtgcgcattatacgagaaatctttcgtcccgcaagccccctttcccaaaaaaaaccgtttttattcaataaatcgttcaagtgctgattaaaagagcaagacgttcaattaaccagcaactttttacttttaacgccgtaaatcagacgaaaaaatattttagcccgttatcacagcttgataaagttttcgcgatagtaggccagttcggccactgactcgcgaatatcgtccatcgcctgatgcgttccctgcttggtaaagccgtcgagcacttctggcttccagcgacgcgcgagctctttcagcgtactgacgtcaaggtaacggtaatggaagtaagactccagctccggcatgtacttgaacaggaaacggcgatcctgaccgatgctgttgccgcaaataggagatttgcctgccggaatccactgtttcaggaactcgatagtcttctgctgggcggcctgttcgtcataagggctggccttgacgcgttccactaatccgcttccggtgtgcgtacgcacgttccattcgtccatcaaggcaagctgtgcgtccgactgatgcaccgccatcaccggcccctcggccagaatattcagattggcgtctgtcactaacgttgcgatttcgatgatacggtcgcgctgcggatcgaggccggtcatttccaaatcgatccaaattagattgttatcactcgctgacataaatagctccagtcatgaaaagtcccacaacggttaattaatacgaaatagctggtatcatagacgttttggtcgcaacgagcgattaaagccagtcaagtgaggcgcagtgactaagataaaactgtcaaaagggcaacaacgtcgcgttaacgccaaccacgaacgtcgtctgactaagaccgacaaacgtaaagagctggacgactccctgcacggcgaaccccaagagggagtggtcatcagccgtttcgggatgcacgccgacgttgaagcttccgacggcagccagcaccgctgcaacatccgtcggaccatccgttcgctggttaccggcgaccgcgtcgtatggcgctccggcgagaacgccagcgtcaaaggtatcgttgaagccgtgcatgaacgcacgtcggtactgacacgtccagatttctacgatggcgttaaaccgattgccgctaacatcaatcagattgtgattgtctcggccatcctgcccgagctgtcactcaacatcatcgaccgctatctggtggcctgcgaaaccgttgaggtcgagccgctgatcgtgctgaacaaaatcgatctgctggacgacgaaagccgtaaattcgtggcacaaatgatggatatctatcgccacatcaactatcgcgtccttgaagtgtcgagctataccggtgagggaatgccggaatttatcgccgcgctgaccgaccgcatcagcatctttgccggtcagtcgggcgtgggtaaatcgagcctgctgaacgcgctgctgccaccgagcgaccaacagattctggttaacgatgtctcggataactcggggctcggccagcacaccactactgctgcgcggctttatcacttccagcacggtggtgacgtcatcgactcccgggcgtgcgtgaattcggcctgtggcaccttgcccctgagcaaattacccagggctttgtcgagttccgcccttatctgggctactgcaagttccgcgactgtaaacacggcagcgatccgggctgtgcaattcgtgaagccgtcgacaaaggcgagattgccgaggagcgttttgacaactatcaccgtattctcgaaagcatggccgatgtaaaaacgcgtaaaaacttcgatgaactttaaaaaacgccggtaatttcagtacaattgccggttcgtttttggctatttatttttcatttttttatttcctacgatctgtcgcttagtgcggcagacgatactttaagaggctccccgtgctggataggatcaaaataaaacttcaatacttacttcctaaacaagggctgacccgacttgccggctggggtgcagaacgccgcgccgcgatgctgacccagtgggtaatcaaagcttttgccagctattacaaagttgatatgaaagaagcgctggacccgaacttttcggcttacccaacctttaatgaattcttcgtgcgtccgctgcgcgatggcgctcgccctgttgtcagcgggctggacatgctgtgcctgcctgccgacggcgcaataagccagctgggtgcgattgtcgacagcaagctgttccaggctaaaggccatttctacactctcgaagcgctgctggccggcaactatcagttggctgaacagttcaaagaaggcctgtttgcaaccacttatctggccccgcgcgactaccaccgcgttcacatgccgtgcgacggcgtactgcgcgagatgacctacgtaccgggcgacctgttctcggttaacccgctgaccgccgcgaatgtgcctaatctgttcgcacgcaatgaacgcgtcatctgcgtgttcgatactgaatttggcccaatggtacaaatcctggttggcgcgaccatcgtgggcagcatcgaaaccgtatggtctggtcaggttaccccgccgcgtgaaggtattatcaaacgctggacctaccctgctgccggtgaagaaggcgcgatcgcgctggaaaaaggccaggaaatgggccgcttcaagctcggttcaaccgttatcaacctttttgccgccaatcaggtcgaatttatgccacagttgaaaaacggcaccgtaacgcgcatgggcgaaccttttgccgaggcgttgcgcccacacgccgtcgaaccggtctctgccgagaacgttatttaagtttgttgaaaggaaattgtcgtgcgcctgatctcaaccctgttgctgagtttgctgttggcgctgccactgtatgccaacgcagcgctttcagaagaccagctccagcaagagctaaaacaagcccaatccagtaaggatacggccaatcaggcgcagatcgtcgagttgctgcaaaatgcgattaactggatgggtgaggcacgtgcttccctcgcccgctcaggacaataccagacggtcatcgacgactttccgcgcctgacgcagagcctgcgtcaggagctaaaaacccagagtgaaaaagcgctgccggtggacgacagcctctcaagcgctgagcttgaccagcagatcctgcaggtcagcagccagctgctcgaagaagcacgccagctgcgccaggagcaggaccgttcgcgggagataagtgattccctgagtcaacttccacagcagcagtctgaggcccgcaacgcactggccgacgtcgatcaacgcctgcaaaatctcaccaagagcaattctccgctggcgcaggctcaagccaaggcgttacaggcagaatctgccgcccgcaaggcgcgcgtcgacgagcttgagttggcacagctttctgcgagtaatcgtcaggaactgtcgcgtatccgcgccgaactgtataagacgcgtcacgatcgtctcgatgaactgctgcaaacgctgcgcaacaatctcaacagccagcgccagcgcgaggccgaaaatgcgcttgaaaaaactgagcaactggccgagcagagcggtgagctgccgaaatcgattacccaacagttgcaggccaaccgcgagctttcgctggcgctaaaccagcaggcgcagcgcatggatctcatctcctcacagcaacgtcaggctgccgcgcaaacattgcaggttcgtcaggcactgagcaccatccgcgagcaggcgcagtggctcgacgcatcgccgctgctcggtgaaaccctgcgtgcccaggttgccaagctgcctgaaatgccaaaaccacagcagctcgacggtgagatgggtcagctgcgggtgcagcggctgcactatgaagacttactcggtaaacagcagcagtaccgccaggggcgtcaggacgacggccaaccgctgagcgccgcacagcaaaaaattcttcaagcgcagttgaaaacgcagaccgatttgctcaactcgctgctttcagggtgtgacacccaaattcttgagctgaccaagctcaaggtcgccaatacccagctggttgacgcgcttaaagacattaatgacgccgcgcaccgctatctgttctgggtcgccgacgtcagcccgctgagcttcaattatccgctacaaaccatgcacgacctgaatcgtctgctgtcgctggatacactctcgcagctgggcaaagcctcggtgatgatggttaccagcaaagaaacgctgctgccgctgtttggcgcactgattttggtgattgtcagcatcagctcccgtcgccactactacaacttccttgaccgtgccagcagccgcgttggcaaggtcactcaggaccacttctcgctcaccgcccgcacggtattttggtcgattctggtcgccctgccctgccagtgctgtgggcggcgttgggttacggcctgcaaagcgcgtggccattcccgatagcggtcgccatcggtgacggcgtgaccgccgcgctgccggtactgtggctgtttatgataagccactatctggcgcatccgaaagggctgttcatcacccacttcaactggccgcagcgccgcgtttcgcgtgcgctgcgctactactcgctgtcaatctggctggtcgtgccgttgattatggcgctgataaccttcgataatctcaacgaccgcgagttctccaacacgctgggaagactgtgctttatcattctttgcgtactgctgagtctggtgacgcagagcctgaaacgtgccggtattccgctgtatctcgacaagcagggcaacggcgagaacctgctgaacagcacgctctggtggttgatgctgagtgcaccgctgattgcggcctttgcctcaatgctcggctatctggcgacttcacaggcgcttctggcgcgtctggaaacgtcgctggccatctggttcctgctgctggtcatttaccacatcatccgccgctggatgctgattcaacgccgtaaaattgccttcgaacgcgccaaacagcgccgtgccgaaatcctctcgcagcgtgcgcgcggtgaagaggaacagcaggtaaacagcaatgaaggggcgattgaaatcgaggagccggtggtcgatctcgacgccatcagcgcccagtctctgcgtctggtacgttcactgctggcgatggttgcgctggtgtcgttgattttcctgtggtcggaaatccattcggcgttctctttcctcgagaacatcaagctgtgggacgtttcctcgaccacccagggcgtcgagagcatgcagccgatcacgctgggccacgtgctgatcgccattctggttctgatcatcaccacccagctggtgcgtaacctgcccgccctgctcgagctggcgctgttacagcatctggatctgacgccgggcaccggttatgcggcgctgactatcaccaaatacgcggtattgctgataggtgggctgaccgggttctcgatgcttggcatcgaatggggcaagctgcagtggctggtcgcggcgatgggcgtggggctgggctttggtttgcaggagatcttcgccaactttatttcaggcctgatgatcctgtttgaaaagcctatccgcatcggcgatacggtgactattcgtaatctgaccggcagcgtgaccaagattaatacccgagcgacaaccatcgtcgactgggaccgcaaagagatcatcgtgccaaacaaggcgttcatcaccgagcagtttatcaactggtcgctgtcggactccgtcacgcgcgtggtgttgacggtgcccgcaccggtagaggcaaacagcgaagaggtgacgtctattcttacccaggcggcgcgcaaatgttcgctggtgctggatacaccggctccagaggcgtatctggtcgacctgcaacagggtattcagatcttcgagctgcgtatgcacgccgcagaaatggcgcaccgtatgccgctgcgtcatgaaatccaccagctgattctggccgggttccgcgagcatggcattattctgccattcccgcctttccaggtccgcatggagacgttgcatcgcggccaaaacggcagcaacgccacgatcagcagcgccggtccacgatcgccgggcgacctctaaagccctgttggctccctgcataccacgcacagggagcctgcaccttaaatgtcggcaaacagtcgcttcgcagtatgacgatgccgggctatcagcgacttcacatccaggccgacaatttgcccctcacgtacgcgccactttccgccgaccatcacgctgtcagcgcgttctgccccacacagcaacagcgcggcgatcgggtcatgacttccgctaaaacgcagctcgtccagcctaaataacgccagatccgcctgtttacccaccgcaagctgcccgatatcctcacggccaatgacccgtgcagatccccgcgttgcccagcctaggatccgctccggcgtggcgtattctgttccgtaacgcagacgctggagataaagcgcctgccgcgcctcatacatcaggtttgaggcgtcgtttgaggcggatccatccacgccaaggccgatcggtgcccctgccgcctcgagatcccgcgttggacacatgcctgacgccagccgcatgttagataccggacagtggcaaatgccggtacccgcagcgcccagtcggcggatctcttcttcgttgaaatggatcccatgagccagccaggtcctatcgctgagccagccgacgctgtcgagatagtcgaccgtgcgcaggccaaagcgctcaaggcaaaactgctcctcgtccagcgtttcggccagatgggtgtgcagacggacatcctcgcgctgcgccatcacggcgctttctcgcatgatatcggggtcacggagaacggcgagcaaggcgccagcgcgatttgcatccaggctccctcgccgcgctggtgatagcgctgaatcagccgctggctgtcttccagaatcacctcggcggattgcaccgtatgcatcggcggcagaccgccgtcgtcttccccgaggctcatcgagccgcgagtcaataaggcgcgcatgcccaattcaccgaccacctcgacctgaacgtcgatggcctcttccatcccctgcggaaacagatagtgatggtcggtggtcgtggtacagccagagagcagcagctcggccattgcaacgcggctcgctaacgccagcgcttcaggctggagacgggcccacacgggataaagctgttttaaccacgggaatagcggggcattgaccactggtgcccaggctcgcgtcagcgtctgataaaagtggtgatgggtgttgataagacccggcagcagcacgcattcggcggcgtcaatgacactgtctaccggccgcgctggctgctgcccgcggacagcagctcggcgatgcgtgagccttcaataacgagaccgccggcggcgtcgagctggttggcggtgaaaacggcgagagggtttttgatccaagtacgttgcgtcaacataactggctcctttaagttgataatcataaggttagccagctcagttatgccctgtctgctgatccaggggcgccgcagcgcaggatatcagtttgctttaatcgatttcactggctcaatgaccgtcgcggtagttttttccattggcatcaggaaattcagcaacatagcgacaattccaccgctgatcaccgcatgaccaaagatattgcccacgacctgtgggaactgtttaaggacttcaggcacggcttcgattcccagcccgatccccaatgaaatagcgataatcagcatctcgcggcggccaagcggtgcctgagtcataatacgaatacccgcggctaccacactgccgaacatcaccagcgttgctcccccagcaccggtgcgggaatttgctgcaacaggccaccgatagccgggaaaaggcctagcaccacaagtaaaacgccgatataaagccccacgcggcgactggctacgccggtcatctggataacgccattattctgcgcgaaagtcgtatttgggaaagaggataacattgccgcaatcatgcagctcacaccgtcagctagaatcccgcccttcagacgcttgcggaaagcctcccctcaatcggctgctgcgacagcatgcagttggcggtcaggtcaccgactgcctcgagaatgctgatgaaagagaccaacgcgatcggcacgaagacagtccagtcgaaatggaaaccaaagcggaacaggcgcggcaactcaaaccagctcccctgtagcggcttgaaggtcagatggccggtcaacgcggcggcgaggcaacctacggcaataccgaccacgatggcagacaggcgcagcgcacgcacgggaatacggttaagaataacaatcaccagcagggttaatgccccaagcccaaggttagccggtgcgccaaagtcggctgcgccgttgccaccgccccaatcggtgatgctcaccttgataaggctgataccaataagcacgatgacagttccggtcaccagcggtgtaaatacacggcgcagctgaccgatgaaacgactgatcaacagcggaataaaggcggcaacaaagttaacgccgaagatcatcgccatgatgtcttccggcgagccaccgcgacttttcaccagaaagccgccggagaggatcacgcccagaaaagcaaaactggttccctgcaggcagatcattcctgcgccgatccccatgatacggcgtgcctgaataaaggtgcctatcccggaagccagcagcgacatgcttatcagataaggcaggtaggcattaagcccaagtactgacccaacgatcagcggcggagtgatgatcccaaccacacttgccagcaggtgttgtacggcggtgaaaaacgcagtcgcaggagcgatgcgggcttccagcccatagagcagctctttttcattggattctgacataacgtggttccgcgataagggagtattacccctttaatgcataaaccaggccattcggtaaaaaactaagcgtaacctgcataactcaatgaaaaataatgtatttttcgcataattttttactgaaactttaaaatcataaaatactaatttgcatacttttgtttcatcagacgtgaattcctcatagattcgcactatgaatgtgcaaagcaccgccacaaggcaagatttgtagataaaaaaaatcctgacccacagggacaggatttcttatcgctgcgcgagaatatcaggcgcgggtaacggggaaagccaatacgtcggcgatgctgtcggcacctagcgcaatcataatcaggcgatcgacgcccagcgcaacaccggaacactccggcatgccgtgcttcaaggcatccagcagattgttgtcgataggatgctgcggcaggccgcgtgcggcgcgctttcggttgtcctgctcaaagcgctgacgctgctcgttgccgtcggtcaattcacggaatccgttggctagctcaacgcctttgtagtagacctcaaaacgctcggcaacgcggtggtcttcggtacttatttcggccagggacgcctgcgtcgccgggaaatggtaaacgaaagtcggcttttctcgcccgatatgcggttcaacgcccatcgcgaacaacagctggagcagcgtgtcacgatcctcttcttcatcggcaatgttggaaagatccagcttggcggctgcttcacgcagttgcgctttgtcggcagacaaagggtcgacgtcaagatggcggataaacacctgctgataggagaccgtttcggcgctgtcgcagtcgaggatctgttgcagcaggtcatccacttcattcatcaggcgatacatgtcatagcgtgggcgataccactcgagcatggtgaattcgggattatgataccgaccggcctcttcgttgcgaaaactgcggcccatctgataaataggaccactgccgcggccagcaggcgtttcatatgatattctgggctggtcatcatgtagagcgtcatgccctcggcggcaccggggccgacgaagcgcgtctcaaaaggaaacaggtgaatgtcggtgatcgttgcctggctcatggtcggtgtctccacctccagaacgccacgatcgctgaaaaaacgtcgaatttcagctacgattgccgcacgcttcaacaaattggcgatagatgcactgggttgccagcttgctgtttcgctcatgatgatttactccgatatcagacagggcatgcagtctactcgcatccccgcaggcaaacaaatttccgttggctacacttaaggcttaacgtgagaaagggacgactatgcgaatctgggcaaaattaggtgtatttatttctgcattactttcagtcggttgtagcattaatccgcctgacaacgtcaaagtggtcaataacttcgagttaaatcgctatctgggcacctggtatgaggtggcgcggctggatcacggcttcgaaaggggcatggagcaggtcaccgccaattacagcctgcgcaacgacggcggcgtgaaggtgatcaaccgcggattcaacccggcgaaaaacaaatggcagcagagtgaaggaaaaggctatttcaccggcccaacctcacgcgccgcactcaaggtttccttctttgggccgttttatggcggctacaacgtgattgagctcgacaaagactatcagtacgcgctggtgtgtggaccggataaaagctatctgtggatcctctcacgaacgcctcagcttgatgccggggtaaaacagcatttgctggaaaccgcgcagcgctatggttttgataccgataaactggtgtgggttaaacagccttaggcgagctaaatcgggtgacacggcaaatcggcgtcacccagttagcaattactgtgcagctctggaaacggcgtgaccaccggcagaaatgtcttcacccacgccgcgcgtcgtgttgcaggcggttaacaggcttgagagaacgataactgacacgagggtgagaatacttttcttcagcatataaaaatccttcctataagagaatgtaaagtataacgctctaagtgtagttaaaattggcgcggagtggagcgagttgatgaaatttcggacaaataagaacaagtgcagaaacgtggatactcggcgaaaaaaaggccgacctaagtcagcctgctcgggaaatggctccgccgaggtgtgacacgtcttcaccaaaaccgtgaaccgtattgcatccgcttaacgctgccagtgccagcactgaaaccacgataaacaacattctcttcaacattgtaaacgtattccaaaaattcaaagggtcgaacgtaagcaccgcggcagtctggccaccgcagcgccttatgcgttatacgtctgcgcgaaaattacttaacgcgagaaacgtattcgccagaacgggtatcaacacgaacaacttcaccgatctgtacgaacaatggaaccttaacaactgcgccagtagacagagtcgctggtttaccgccggtaccggcagtgtcacctttcaggcctgggtcagtttcggtgatttcagcttcgatgaagttcggtggctgaactgcgataggacgaccgtcccacagagtcacgatacattccgcattgtcctgcaaccatttagccgcgtcacctacggttttctcttcaacaccgtgctgctcgaaagtctcagggtgcatgaagtggaagaactcaccgtcgttgtacaggtagttcatgttggtatcaacaacgtccgcaccttcgcaagagtcggtagacttgaaggttttctctacgcgagaaccggtcagcagacgacgcatcttaacgcgtgcgaaagcctgacccttgcccggttttacaaattcacttgattcgatagcgtaaggctcgctttcgaacatgattttaagacccggacggaaatcgttgctagaataagtcgccataatggccctctaattttaaactggtagcttagccaaaaaaatggcacacattgtaaccctaaatacgccatttagagaagattggttgtatcaactcggcgatgttattacagacccggacgaactgcttactcttctggcacttaacgatcatgcagaactgcagcagggccgcgaagcccgtcgtttgttcccgttgcgcgtgccgcgcgcgtttgttgcgcgcatgcagccgggatgtccacaagaccctttacttttgcaggttctgactgcgcgcgaagaatttatcgcggcgcccggctttagcactgacccgctcgatgaacaaaaaagcgtggtaccggggctgctgcacaagtatcgcaatcgcgcactactgctggtcaaaggcggctgtgcggtgaactgtcgctactgcttcagacgccactttccctatcaggacaaccagggaaacaaaaataattggtctcaggcgctggagtatatccgcactcagccggaactggatgaaataattttctccggtggtgacccgctgatggcaaaagaccacgaactcgactggctcatcagcgagctggaagccattccacacattaaacgtctgcgtattcacagccgtttaccggtggttatccctgctcgcatcacgcaggggctctgtgagcgcctgcgtgagtctaggctgcaggtccttatggtgacccacatcaatcacgctaacgaaattgatgacgagctgagaaacagtatggcgcgtctgaaaaaatccggtgtgacgctgctcaaccaaagcgtgttgctgcgcggcgtgaacgacaacgtcgagacgctggcgacgctgagcaatgcgctgtttgatgcgggcattttaccgtattacatccacgtgctggacaaggtgcagggcgcggcgcactttatggtcgaggatgacgaggcaagagcgcttatcaaaggtttgctgagtcgcgtatcgggttatctggtgcccaccctcacccgcgagattggtgggcagccgagcaagacgccgctggacttaggtctgacgcaatcctgatttttctctgaattttttcggagtctgcgcagattgatgccaagcaaaagggatgcccgttggcatcccttttttattggctatggttatcggttgtggccgcttatgggcacttataaacctgaccgaccattttgctgtccagcggtgcaaagctggagaagatattctgcgttgggctattggcaccataaatggtattgccgcccagtgccgccgccttgttacgcaaatcgtttgccgcgccgcgcatggagctgccgtcaccggaggtccctgacaaccagttgctttgagcaccggtcacggttcccagagcctgacactggctgctcggtttttcgtcggtgaatttcacctgttgaccggcagagcttaattgatttgctgtgctgcaacccgccagcagcatgactgccgaaaggccaagcaacattttaatccgcatctctttccccatttgttttgagaagtacctaacgcctatcagataacatttcgcaatctaaggcatccgttgccgagtttacctaaaattcaacgcattatctgacacgaacccgtggcagagcgtgcccatagtttacacgttatttaatcaggacgatgagacttatcttacttaacaccacaaaataaaggtacaaatttcagaatcacttcacatttaagcgttcgctaagcagacggcagactaaaccctgaaaaccatccataaaaaaacccgaccttaaaggccgggcttctttagtgctgaccgagccgaagcccagtcagaacgcagcagaaagactgccgggggatgattacatcatgccgcccatgccgcccattccacccataccgccagcgccgcccatgtcgactttgtcgtctttaggcaggtcggtaatcatgcactcggtggtgatcatcaggccagctacagaagacgcgtactgcagagcagaacgggtaactttagttggatccaggatacccatcgcgatcatatcgccgtattcttcggtgtaagcgttatagccgtagctgccttcacccgctttcacgttgttggcgataacagaagcttcttcaccggcgttgataacgatctgacgcagaggtgcttccattgcacgcagtgcaactttgatacctacggtctggtcttcgttgtcgcctttcaggccagccagtttgtgagcaacgcggatcagcgcaacaccaccaccggcaaccacgccttcttcaaccgcagcacgggtagcgtgcagggcatcttcaacgcgtgctttcttctctttcatttcaacttcagtcgctgcgcccactttcagaacggcaacgccgcctgccagtttagccacacgctcttgcagtttttctttatcgtagtcagaggtcgcttcttcgatctgctgacggatctgatttacgcggccctgaatggtggtttcgtcaccgataccatcgatgatgatggtggtgtctttgttgataacaacgcgcttagcctgacccatgtcttccagggtcgctttttccagctccataccgatctcttcagagattacggtaccgccggtcagggttgcgatgtcttgcagcatagctttacgacggtcgccgaagcctggtgctttaacagcagcaactttcacgatgccacgcatggtgttaacaaccagcgttgccagtgcttcaccttcaacgtcttctgcaacgataagcagtggtttaccggctttagcaacggcttccagaactggcagcatttcgcgaatgttggagatttttttgtcggccagcaggatgaacgggctttcaagttcaacagcgccagtttctggcttgttgatgaagtaaggagacaggtagccgcggtcaaactgcataccttcaacaacgtccagctcgtcgatcaggccagtgccttcttcaacggtgataacgccttctttgcctactttttccatcgcctgagcaatcagtttgcccacggtttcgtcggagttggcagaaatagtaccaacctgagcgatagctttagagtcagagcaaggaacggacagctttttcagctcttcaaccgcgttaacgacagctttgtcgataccgcgcttaacgtccattgggttcataccggcagcaacagctttcagaccttcggtgatgatggcctgagccagcacggttgcagtcgtagtaccgtcacccgcagcatcgttagctttggacgcaacttctttcaccatctgagcgcccatgttttcgaacttgtcttccagttcgatttcacgcgcaacagaaacgccgtctttagtaatcgttggcgcaccaaaagatttgtccaaaacgacgttacggcctttagggcctaaggtcactttaactgcgttagccagaatgttaacgccgttcagcatttttacgcgggcgtcgttaccgaattttacatctttagctgacattataatttcccttaaattcgttcagttcagaaaatggggtgacgagacgattaggcttcaacgattgccagaatgtcgctctctgacatgatcaacacttcttcattgtcgatcttctcagctttaacgccgtaaccgtcgttgaagatgacgatgtcgccaactttcacgtccagcgctttcacttcaccgttttccagaatgcgaccatgaccgacggccagaatttcgccacgagtagatttagcagcggcggagccagtcagaacgatgccgccagcagatttggtttcaacttctttacgcttgacgataacgcggtcatgcaatggacgaattttcattgataactctcctgtgagcaggtccatatctaataatttagggttgaacgccaggtagaaagcctatcctgacctcgtggtttgattaatggggcattacgcgccccttcaagggcagaaaagaaaatttttttgaattttctttatccgcaaacttagcgatccttatgatcctgacggtcttcatcaatttgagataccagacgctcggtgggctcgtccttacgctggaattctccgtcaaaggtattgcccatcgccgggcctgcgccaccggggcgatagatattcaggtggggcatcagcttcagggtcagagatttctgcaccggcggcagcaacagcagcaggccaaggagatcggtgaagaatcccggtaccacaagcagaaaaccagccagcaccagagaaacacttttcaccatctcggcggccggactttcgcccaacgccagcttttgctgtagctggaagatagttttcataccttgattgcgcacaagcgacacgcccacgcaggaggtaaagaccaccagcagcagggtaaacgccacgccgatgacagaggcgactttgataaataaggttatttcaatgtaagccaacagaaataacagaagcagaggtaaccagcgcactgcgctctccttgtgatgacaagccctgaagtgccctgtcaggcgtcgattcagaactctataatgggggtcccatagggttatcctatgaagactgacaacagtgagatggtatcgttaagaggcaatttcaacctgttggcgatatttaattgggttggggtaattaattgtgagaaatttcacagaaatctaaacctctcgtcacaaagcccctgtgggatggacttagtgcgtgcatttcgccataagcagcatatgatcgcacccgcggccgagctaagtggtgtaatattttattttatccagcgtccgtaacataactctaatcagcctgtaactgtttagcaccaaaaagaaggttctcatgtcaaatacgattcgtatcgaggaagatctgctgggtacacgtgaagttcccgccgatgcttactggggtattcataccctgcgcgctgttgaaaacttttatatcagtaacactaagataagcgatgtgccggagtttgttcgcggcatggtgatggtaaaaaaagcggccgctctcgccaataaagagctgcaaaccatcccacgcaaaatcgccgacgtcatcatcgcagcctgcgatgaagtgttagataaagggaaatgtatggatcagttcccaatcgacgtttttcagggcggtgccggtacttccgtaaacatgaacaccaatgaggttctggcaaacattggcctcgagctaatgggccaccaaaaaggcgactaccagttccttaatcccaacgaccacctcaacaagtgccagtcaaccaacgacgcttatccgaccggcttccgcctggccgtctatgcctcattgcttaagctggtcgatgctatcgcgcagctgggcgacggcttcgagcgtaaagcggtcgaatttgaaaaaatcctgaagatgggccgtactcagcttcaggacgcggtacccatgacgctgggccaggaattccatgcgtttaacgtgctgctgaaagaagaaacgcgcaacctgctgcgcaccggcgagctgctgctggaggttaacctcggcgcgaccgctattgggacacgcctgaacacgccagaaggttatcaggtgctggcagtgcagaagttggccgaagtcagcaacctgccgtgtattccggccgaagacctgattgaagcgacgtccgactgtggtgcttacgtgatggtgcacagctcgcttaaacgtctggcggttaagctgtcgaaaatctgtaacgacctgcgcctgctgtcttcgggtccgcgtgccggtctgaacgaaatcaacctgccggagctgcaggcgggttcttccatcatgccagccaaggtaaacccggtcattccagaagtggtgaatcaggtttgtttcaaagttatcggcaacgacatgtgcgttaccatggccgccgaagcaggccagctacagctgaacgtgatggaaccggtgattggccaggccatgtttgagtctatccatatcttgaccaacgcctgctacaacctgttggaaaaatgcatcaacggcattacagccaacaaggaagtgtgcgaattctacgtctttaactcgatagggatcgtcacctacctgaacccgttcatcggccaccacaatggcgatatcgtcggtaaaatctgtgcagaaaccggcaagagcgtgcgtgaagtggttcttgagcgcgggctgctgactgaagccgagctggacgatatcttctcggttgagaacctgatgcacccggcctacaaagccaaacgctacaccgacgaaaacgagcaataatcagccagccttaaccgctaaaccttaccgtttataagcgtaatggggggcgcggaggtcttttgaactccgtgccccttcttttatagaaaaaaaccctgccttcgctcgccaattcattaataattcaacttcgattcttctggtaaatgcagtaaaaaataataattggaaaagtgattatggtaattcttgaactggtcatcgtcttcgccgccatctttctgggtgcacgtctcggcggcgtaggtatcggcttcgcgggcgggttgggcgttctggcgcttgcgctggcaggcgtaaaacccgggactatccctttcgacgtcatctctatcgtgatggccgttattgccgcgatttccgctatgcaggtcgcaggaggaatggactatctggtgctgcaaaccgaaaaactgctgcgccgtaatcctaaacacatcaccctactggcaccaatagtgacctatttcctgaccgtgctggcgggaacgggcaatatctcgctgtcggcgctgccggtcattgccgaggtttccaaggagcaaggcatcaagcccagccgtccgctgtcaacggcggtcgtcgcggcgcagattgccatcaccgcgtcgccaatttctgccgccgtggtatatatgtcatcagtcatggaaggtcacggcatcagctatctgcatcttttaatggtgcttatgccttcaacgctgtgcgctattgtgctgacctcattgattattagcctcttttttgattccaaactgcatgatgatcccgtctatcaaaagcgtttcaaagaagggctcattagcctgcgcggcaacaagatgcttgaggtaaaaccacgcgccaaagcctcggtgggtatcttcctgcttggggttttatcggtcgtagcctatgcggtgataagcagcccaggaatgggtctgataaccacgccaatcatgaccaccaatagcgccattttaatcatcatgctgagcgtcgcgacgattatcaccttgatgtgcaaggttgataccgatcttatcctctcgtcgggcaccttcaaggccggtatgagcgcctgcctctgtattttgggcgtagcctggctcggcgacacctttgtgcaggccaacctcggctggataaaagagacggcgggtggcctgattcagtcacacccttggttgctggcggtgattttcttcttcagctcggcgctgctctactctcaggcagccacagccaaggcgctgatgccgctggcgttggcgctgagcgtatcgccgctgaccgccgttgcagccttccctgcggtatcaggcctgtttattctgccgacctatccgaccctggtcgccgccgtgcaaatggatgataccggcagcacgcgcatcgggcgcttggtctttaatcatccgttttttattccggggacgctggctatcgtgctgtccgtgattttcagttttgcgctaggcagcattattctttaacagttttaccctgcgctatgtctctggtttagcttattttctcggtaaagaaccttaatcatgctcagctgacgttctcccaacccgccatgaagggtataatggcgggttgaaaaacaggcgatggaaagacgcagcgccttatcagaaaggcttaatacaagagaaaatgctcccgtgatggattacccgtttcttaaaaaattcttccaactttgctgtctgctgctgtgcagcctgacctttttgcccaccgccagccaggcctcattttttggcggatctaatacgccgcattttgtcacggtcgatcaggcatttaccttcgatttttcgcaaaaaggctcggatctcgccctgaactggcaaattcgtgacggctactatctttatcgtcaaaaaatcgacatcgtcgccgaaaatgccacacttgccgcgtttattttgccaaaagggatcgctcatcatgacgaattcttcggcgattcggaaatctataaaaacaacctcaacattgccattccgctgcgtgaagcaaaggccaatgccaaggttcgcgtaacgtatcagggatgcgccgccgccgggttctgctatccgccggagacgcgagagatcccgctgagtcaggtttccgccaacgcgccagactttgttgccccaccccaccctgctttctcagccgtgcctgtcgcggtgcaaacgacacctcagcccacgccgctgcctttctcgccgctttgggcgctgattatcggcataggcattgcctttacgccgtgcgtcttgccgatgtatccgctgatttcgagcattattctaggccgtgagcgcccgcatagcctgaagcggattttcctgctagcgatgctctacgttcagggcatggcgctgacctataccctgcttggcgtcgtggtggccgtcgcgggcctgcaattccaggccgccctgcaaagtccatgggtactgattgccctgtcggtgatgtttattgcgctggcgctctcgatgtttggactcttcagcctgcaactgccctcttccgtacaaacccgtcttgcgctgatgagcaacggtcaaaaaggcggctcgctggttggcgtgtttgtgatgggcgcgattgccgggcttatctgttcaccctgcactaccgcaccgctcagcgccattctgctgtatatcgcccaaagcggaaatccgtgggcaggcgcagggacgttgtacctttatgccttcggtatggggatcccacttattgccgccacgctgttcggcaaccgcctgctgccgcgcagcgggccgtggatggattacgtaaaggaaggctttggtttcgtaattcttgcgctgccggtgttcctgcttgagagagtgattggcgacacctggggcctgcgcctgtggagcattctgggcatagccttctttggttgggcgctgcaactcagcatgaagagttcgcgcggcgttttccgagtactacaactggtgtttctcgccgccgccctgatagtcagccgtccgctgcaagactgggtcttctcggcgccggtaacgaacgaggccgccagccctacccttaagttcgataagatccataacgttgacgaacttaatgcggctcttcagcaggccaggggccgccgcgtgatgcttgacctctacgccgactggtgtgtcgcctgcaaagagtttgataaatatacctttacctcgccacaggttcaggaagcgcttgccaacacgctgctgttgcaggccgacgtgacgcagaatagctctgagcaggccgctctgctcaaacgcctgaatgtactgggactgccgaccattctgttttttggaccggacggtaaagagctccctcagtcgcgcgtcaccggctttatgaacagcggcgaatttagcgcgcatttgcacaatacccagccttaaacgacactaatacccagagctattggcggtgaagcaccctgtgaacgccattagcgccagttttgaggaggaaaaaagtgctaagagaacaggttctagaccaaacgctcaacctattggaacaacgaggtctggcaacaatgtctttagagtcggtagccgacctggtcgatgtccctttaaacgagctaaagcttttttggccggacgccgaggcactgctctatgacagcctcagacaccacggagagcaaattgaggtttggcgtcgtcagttactgttagatgagacgctgacgccgcctcagaagctgctggcacgttataaagtacttaatgaacaggtcaggcagagccgctacccaggatgcctgtttatcgctgcgtgcagcttttatcccgacagggaatctccaattcaccagttagccgaacagcagaaaacagcctcattcaactacactctgtctttactacaggaaatgggttctgatgacccagaaatggttgcccaccagatggagctcattcttgaaggctgtctaagccgactattagtcaaacgccagcttcacgacgttgaagtggcaagcagactggcagaagacgtgcttaacgtcgcccgctgtcgtgagcacggtgcgctttcctgagttcaaaatgacgaaatttgccccagctctgtgatttttgtctgaaaagccagcagtcagtcaggttttgaaggtttaaatgcataaatgcgttgacggcgcaggggcaatacggtttaatgcgccccgttgcccggatagctcagtcggtagagcaggggattgaaaatccccgtgtccttggttcgattccgagtccgggcaccatattctgaagaacccgcctatggcgggttttttgcttttagagcgacagactctgcattaaactttcttagttttcccgcttagaacgccctcagcccccggtacacggcagacgatttgtaatttttttattaaaaagcccgcgcccattctccgctttcactgaaaaatcaacccgctttcgtatcatacccgcattgaccaatagcaaacagatttaaaccttttcccatagccctcgaaacgcgtcagaactactattattatgattaaccgtgttagactctttttctgaaatattcgtcaaacactgaaaattttatctttcatgcaaagaataaatgaatgatggcgtcgttttattgtcttaatctaagttggacttggtttaattacctgaaagacagacatgatgcggagtgctaaaatgcttaatgacgcagtgactgaacagaacaattaccttagcaacctaagaaattataacaatgaaacactatgatttgagtgttatcgtgactgcgcacaactgtgcgaagtacctaacagcttgcctcaactctatccaggtagctatgggggataaattccctcagtgcgaactcgtgctgattaatgactcttcttccgacgacacgcccgcccttttcgaagcctttgccgcgggccgcagtaatgtcgttcagtataacgtcgcttttaaaaacatcggtaaagtcaggaacttcggtgtctcacaggcccgtggtgactacatcaccatggttgacggcgacgaccagctcaaacccgactccctggtggaaattatcaatttcctgaccaccaacgagccagacatgctgataaccaagctgaccgaggtccgtgacagctcttcaccggtgaaccacgagcctatgcagctcaagcagatcaccaccgatattgccatcaagaaatacctcattcaccaggcgtttcaggcccactttatcggcaagtttattaagcgcagtattcttttacgctgcaaatttccgaattatatttgctacgaagatgcctttgtatttcccgaggtattaaaaagctgcaaggatatttatttctcttccacaggtccttatatgtatttcaaacatggtaatacattatccagcgatctcgatgaagagaaaattaaactctgccgtaatggactggaccaaatgtcattagtcctgaaaggtgattataaatttcttcaggtttgccattggattgaatttataaatcgaaatcatttaacgatttcaaaatggaaagacagaagctcgataaaacagaatatcgaggaagttgatacgctgccgttcttactccatccggcggtcagaattagctataaacgtaagctaattaaagttaaaaaacttattcgctcctggtaattcgcgttgaaacaagaaaaaacactcactattctgatgtgaatcatggagttggtgtttggtcaaacgtgacgtgatgttcacttttcagccatactccttcccggcatcttcacgctttacttctgttgtccttcatcaaatcactcactttcatctttaactttaaaattacgctttgctgttatcaacttgacaaatagtgcgctctctcagcaaaaggccgcgtctaaaacagaaaaatatcgcctagcgttatccatttagtgcttatgttggaaaaagtaaaacgggggtaaataatcccgcagaaaattgtgatttatgtctcacaggtttagcattcttcatcacaactccataattaaaaacccgcacgcggcgggtttatgtgggcttgcagaaaagcacaataatattcaggcagccagcgtcgctcccccgtcgataacaatatcctgcatggtgatatgccccgcacggtccgaagccataaataataccgcctgcgcgacatcctgcggcttgccaatcttgcccaaagggataccgagcttgaactgctcaggaaaaccagcgatggtcagctgttcgctctccggtgaggtccacatgccacgctgcatcggggtatccgttgaaccgggtgagaccagattacagcgcacgccgaacggtgccatctcgagtcccacactcagacagagactgcgcagtgcggcctttgacgcacagtaggccgacatgccgatacgcggaacgtgggcagcgtttgaggcaatgctgacgatcgcaccccgcttctgacgacgaaatacgggcagcgtatgacggaacatgttgaaggctccgccagcgttaaccgcgagacagtcgtgccagtcctcgtcactcagctcatcggttgcacccatgcgcaggatacccgcgccgttgaccagtacgtcaagcccgtcacgctcggccagcagccgttgacaaacttcacgcgccgccttggcgtctgtgacatcaagcacctcggtgcggaaaggataatcaccctcgttaaaatgcttgtcgaagccaaccacctcagcgcccgctttaacgaatgccagcgcggtcgtgtagccaataccctgccccgcgccagtgacccagacgcgcttgttggcaaattccaacgcgttatccatcaggccttctctcccgacaacagcttgaaccagccattgagggtcggcgttttggccagcgccacgaagtcgatgtcttcacgaattttacgccaacgcgtcgcgagcgccatgatgcgaacagaatcgagaccgtagtcgatcaggttgtcgtcgttatccaaatcttcactgtcttcgtcgagcaacggcaagatttcacggcgcagctgctcaaggctaatgctttcacctttggcacccaccaaatcttcggtcattaccacgcggccgcagcggcccgcagtataacgaagcgccatcagatgctcatcgcgcgagaagtcggccagaccatcggccaccatgaacggctgaatattacgcataaagccgtcgatagccgtcgtcagacaaccgatatgcgcgtagacgccgcagataatcagctggtcgcggccggtctcctgcaagatttcctgcaacggcgaacggtggaaggcgctgtaacgccattttactaacacctggtcgtcttcgtccggtgccagtgcagcaacgactgcctgctgttcagggtgcttattcagccccggtccccacatgtcgttaagcagcgcacggtcttcatcactctgattgtttggctgagcggtgtaaaataccgggataccctgcgctttgcagtagctgcgaaggttggcaatattttcaacaacctgcttgaccagcgggctatcctctccccagaaattgaggaagtattgctgcatatcgtgaatcagcagcgcagcacgcgagggttccagctcccattgcaccttgttggtcggcagttcggcaacggtcggcagcgcataagaatcgagttttggaatggccatcgtttattctccagaagtcttgatcggtgattgcgcttcaaatgtttggcgcaaaagctttttatctattttgccgaccggggtcagcggaagccgttcgacgcgaataaagcggtcaggcagcttgaattcggctatgccttgctcgcgcagatgacgacgcaaagcgggagatttcagctcgacgttcgagacgataaacgcacagctcttctcgcccatcagctcgtcgggcatggaaaccagcgctgcattgacgatgtcagcatggcgcagcagcagattctcaatctcttctgccgcaatcttctcgccaccgcggtttatctggtccttcagacgcccctcaaccttcacgtaaccatcttcagtcagtgaaatcagatcgccagaacagtagaaaccgttgtcatcaaaggcttcagcgttatgttcagggctgttgtagtagccgcggaaggtgtatgggccacgcgtcatcaggcgaccgacttgcccggctggcaaaggattaccctgttcatcggcgacccagagctcgtcgtccggtgacatcggatagccctgcgtggtcaggatatgctgctcgtcatcatccagacgggtgtaattcaccaacccttctgccatgccgaatacctgctgtagctggcagccaatctcattctgaatgcgtgccgccagcgtttcccccagcttggcgccgccgacctgcaacagcttaaggctgctcagcgcctggttgctgccccattcttcaatggcctgtagccacagcgtaaccgcaggagggaccagcgccgtcacattaatctgatgcttttcaatcagctggaagcacaccagcgcactcggatccgccgccagcaccatctgaccgccaccgtaaaacacaccgagcgcacctggtgagctcatcggatagttgtgggcaatcggcagcgcacagaggtaacgcgtttcgctattgaatcggcacacctcaacgctcaggcgaatactgtagtagtagtcgttatgggtccgtggaatcagcttcggcgtaccggtgctgcccccgaaagctggaaaaaggcgacccgatcggcggcggttggcgaggcagtaaacgttgcctgctgttcgctaatccacgccgccagtgattgttcttccgactgcgcaccgcgcagcgcaacctgccgtaaggacgggtgctgacccagaaacgtatcaaggaaggcatcgtcgccaaacagtgcatgactgcggtcggcaatcagcagggctggcttgatttggctggcataggactggagctcggtacgctgatggctgaacagtgcattcaccggcaccactccaattttcagcagcgcaaagaacacgacataaaattcgtttacgttgccaagctgaacgagcgcggtgtcacccgaggtcagtccgcggcggcgcagggcgcccgccagttgattggactgcttctcaagctcgcgataggtcatgctgcccgccgcatcaatcatcgcgacgtggtcgttattggcctgacgcgtcaagatgtcgatcaggggtttatcaatccagtaaccgcgttcgcggtaaagccgtgcaagattctccggccaggcggtaaaggcaatgctcatagtattttctcgaacgtcagtttctgtcgttaattcagaccaaatgcgcgcagcatggtattgagtttgacgccagtttcgcgccactcggattcgggtgaggagtcgggaacaatgcccgcccccgcaaacaggcgcacccgatcgtcgctgaccgtgccgcagcgaatggtgacaacccactcaccgttgccacgatcgtcacaccagccgacgatcccgccgaatagcccacgatcgaaaggttcaagctgttctatcagatctcgggcaaccaacgttggtgtcccgcacagcgcaggcgtcgggtgcagcaggcaggcgagcgacaatgcgttctcctgcgcgtcctggacttcaccattaatcggcgtcgagaggtgccagagcgtcgcggtgctcagcaattcaggggaagacgggatatccagggcacggctgcggctcttcagcaccttacccatcccttcagtgacgatgcgatgctcataaaggtctttaccagactcaagcagcgcgcggctgacttccctatcctttttcggatggctctctcggcgggtggaaccggccagcggattggagtggaacttattgccgtgtttacgcagcagcagctccgggctcgcaccgatcagcgcccccttctcgagcgggacatggaagtgatagccgtttggattctgactgacaacccgactcagcagcgccggacgcgccaccggctcacaggtttttatctcgagcagacgcgacagcaccgttttgtccagctttccgtcgttcatcgcctgcaccgcatcgctgaccatctgcataaacacgtcttgcccaggcaattcgtttttggtgaggatctctggcaaagaagattcggcctgcgtggcgacggacatcgcggcatcgcgcgcgagccagcgggtcttctgtggcacgaaaagcgccgaaggttggcgtttatcgaagggaatcgcgccgcacagtacagggtgttttatgcctgccgcacgtgcgtcggaaaaagcggcctcaatggcctgctggaacttgccacccataacgtcgccatcggcagcaggttctgaaattttgaccagacaaccttccgtactaagacttcggtatggcgaggtaaagaaaaagcccgaggtaggggaaagttcggcaacgtttacgctttcaaggtcttgctgcccatcggcaaaatcgaacgttttcaacacagtatccatctgtataatcctacgtgatataatgataattctcatgataattattatcatttgtatttaaacatgtttaaagtacgttatgcatttatcagtgtcaatgcgcgagaattcagtccggcacgattcatccgctctggtattgctcgcaaccgactgaaaccggcagttactcacatttaaggttttgaaaatgaagtggacaggttttcgccaactggcagtaatttttggagtattttttactttaacggcttcggcccacgccgctgacggttggccgagggagattaaaacctcgcggggtacgattacgctccagcacgctccacagcgcattgtttccaccagcgtgaccgtgaccggcacgcttttggctattgatgcccccgttgttgccagtggagcgactagcccaaacacgcgaatcgccgacgctcagggttttttccgccaatggggtgacgtcgccaaacagcgcggcgtgcagcgcctgtatatcggtgaacccaatgctgaagcgatcgccggagctgcgccggatctgatcgtcgtggccgccaccggcggtgactcggcgataaaactttacgaccagctgtcggccgttgcgccggtattggtggtcaactacgacgataaaagctggcaggagctggcgcaggagttaggccaggcgacgggcaaggaggaccaggccgccaaagcggttgcccgctttgacgcacgtgagaaagcggtgaaggcgagcattcacctgccgccacagccggtttctgccttggtttatcgtccagacggtaaagcggccaatctgtggacaccggcttccccacaggggcagatgctgcaacagttgggctttacgctcgcacaaccgccggccaatgctgctagcggccagtcgcagggcgtgcgtaaggatatcctgcagttagcaggggaaaatatggcggccggcctgaacggcaaaacgctgctgctgtttgctggcgataaaaatgacgtgcagcgtgtggaaggaaacgtgttcttgagccacttgcctgcggtacaaggcaagcaggtctatgcgttaggtgatgatactttcagattggattactacagcgccagcaatgtgctaacgcagttagaaaaacagtttagcagtcactaaaactgcgcagcgggccggagtttgacgctggcccgcggttaacgttacttcaccgaacgcgtcagattttgaaccgctcccacctcgccctggctgacgttgcgcagtgcacgcataaagaaggccaatacgatgccaacgatcgccgcccccagcccaaaactcgccgagctaacggcgggcagcataatagaccccatcgagccaagcagcagcgcgcccaacgcatcacccgtgacgttctgcgccgtccataatccgttgattcgtcccaaatactcatctggcgtcaggcgctgaatcagcccatattgcagcaaagaattgatggcgctcagataaccaaaaatcaccagacacagcagcgcagtgctataccacggcatcaggctaaacaggccgacggcaataaatgaggcaatggcggtcatcagcatcatccagccgggacgcgccacgccggccacccgaccgcttgtaaaggcaccaatggccgccccaaaggaaccgctgcatacattaaccccagccgcgacgggtcaacgtgccattgcccggaaagcgccggatagagcacgcgaaccgcgctggccatcgtcaagagcgcaccaatcagcgccaccatgccgataatcttgttctgcaacaggaagcggaatccgctcatcagcgcccgcagcggatgttccctcggctgcggcggcggtgcgagctgcggcaattgcaggataggcagcaaggtcagcagcgtgccaagcgccgccagaccatagttccacactacgccgccgctggcgatgatcaggccgccgatggcgggcgaaaggatcgagccgaagcgcacggtcagcatgttcaaggcccccgcctgcaccaggttctcacgccccactagcgcaggcgttgcggccagcagcgcggtcacgcccactgcgccaaagaagccgtcccagacggacaggaaataaataaccgccagcgaaggggaaggcatggcagcgttaacgcacaaaccgacaaaaccgagaccgcaggtggatcgggcaaaaagaatcaaccggcggcgttcgtagcggtcggccatgacgccgcccatcagcagcccgacaaacatcccgctccccgccagcgttaccgccagccccaccagcagggtagagccggttaacgcctgtatctgcaccggcagagcaatgccgagcaggccaagcgccagaatagaaataaagcgtgcacagaatactgaccggaagtcagggtgcgttttcagtaaactaaaattcaataaaatagagggcttatccatgcaagtttttataccaaaagtcatttgaatcgtagccaaaatggcggtgtagcggatccgcaagcgtggatgctgcaacagatcgatgagtcatgctaacatatacaaatacaagcgataacgataataaatatcattaacattacatcattggttcgaatcgatggaccgtttcgataaaaaatggatagagcttatgtctcggcagacccatgccaccgcacttaatacctcaccgccttctttccttgtctcacgccagctgggtggtattttcgtggctctcctgctgctccttttgatgatagttctcagcctgtcagtgggggaaaaatctatcccctttgatacggtcatcacagcgttaaaggggcaatgtggcaacgccgactgtgtgatagtgctcgacgctcgtctgccgcgcacgctagcgggcattctggcgggaatggcgctcggactttcaggcgcgctgatgcagattctcacccgcaatcctctggccgatcctggcattcttggcgtcaactggggtgccagctttgcggtagttatcggcatcgccttttttggcgccaccgatatcaaccactatctgtggtacgcatttggcggtgcgatgatagcgacactgctggtcgcggtgataggtgcgctaggacgcggactcatcaatcctgtccgtctcacgctggccggtgtggcactcggcgcggtgctcgaaggcatgtcttcgggtatttcgctgcttaatccacaggccttcgatcagctgcgcttctggcaggccggtactctcgacatacgcagcatggccgttatccgcaccgtcgctccgcccattctctttgccagcctgctgacgctgttgatgagtcgttcgcttaataatctgaccctgggcagcgaattggccaccgcgttgggcacgcgcatcgctctgacgcagctcaccggcctgctggcgataactttgctttgtggcagtgcgacggccgctgtcggcccgataggcttcgtcggtctgatgatgccgcacattgcccgtcgtctttcgcgcaccaatccgcgctggatgctgccctggacgttggtgctgacgccgtcgctgctgctggccgccgacctgctgggtcgaattctggtggtgggcgagatgcgggtttcagtggttaccgccttcattggcgcgccgatgctgatttggctggtacgccgccctgacggactgagccgaggatgagcatggatcccgccctgaactcaccgcgtttgacgcccccaaaatcacgcctcgcacgcccgctgctgaccgccttcgcgctgctgctgggctgcgtgttgttagccgtctacgcgcttggcagcggcacgctctcgctcagtgcccatcaggtgattgatgcactgcgcggtgaaggcccgaaaaatctgtcggttattgtcacccaatggcgtttaccccgtgtcgcaatggccttggttctgggcgcagcactgggcattagcggtgccatatttcagtcactgatgcgaaatccgctcggcagccccgacgtcatcggctttaacaccggtgcttacagcggtgtgctgatcgctatcgtgttgttcaacggcagcatcagcgaaataaccgccggtgccatggcgggaggcatccttactggcctgctgatttactggctggcgtggcgtaagggcgtgcagactttcaggctgatcgtggtcggcattgccattcgcgccctgctgattggcaccaatacctggctcatcatcaatgcctcgctggagtcggcgctgaccgccggtttatggagcgccggctcgctcaacggcatcacctggcagaagagtctccctgcgatcggcgtcatcgttgttgccgtgctgctggcgcaaatgctgtgcagaagaatgcggctgcttgaaatgggcgacgacacggcctctgcgcttggcgtaccggtcgaacgttcgcgcctgctgctgttgctgaccggggtttcgctgactgctgcggcgaccgccgtcgccggaccgatttcatttatcgcgctggttgccccacagatttctcgccgtctgtgtgccaatcagcaacagccgctgctctttgcggcgttgaccggagctctactgctgctggccgccgacgtcaccgcccagcgcctgtttatgccctaccaaatacccgttggcgtgcttaccgtcagccttggcggcatctatctgattgtattactcattcgggagtcacgacgctaatgagcactgcacagttttccccgttacgggcagaaaatctcaccctcggttatgagaaaaaggtggtcgcacgcgatttgtcggtcgctgtccctgagggcaaagtcacggtcattatcggccccaacgcctgcggcaaatcgactctgctgcgtaccctgagccgcctgatgcagccgcaaaagggcgcggtgtggctgaatggaaaaatgatcggtgagatgccgaccaaagaggtcgccaaacagctgggcctgctgccgcaaaattcgaccgcaccgggagatatcagcgtggcagatttggtcgccagagggcgttatccacatcagaatctcttcagccgctggcgagcggaagacacacaggcggtcgaggaagcgatgcgcgccaccggcgtgtatgaacttgccgacaggctggtcgataacctttccggcggccaacgccagcgcgtctggatagcgatggtgctggcgcagcagacgccgctgctgctgctcgacgagccgacaacctggctggatatcgcacatcagattgatttgatggagttaatgtgcaggctgaatcagcaaaacgcgcgtacgctggtcgtcgtcctacacgatcttaatcacgcctgtcgctacgcgggccatcttatcgccatgaaagacggcaagattgtcgcagagggtgcaccggcggatattgtcaccccagaactgatagagcaggtgtttggcctgcgctgtcatatcatcgactgtccgatttcccataccccgctgatcattccactgggccacggcaaataggtaaaaaaaaccccgcaccaggcggggttgtttattctacagcgcacgcagcagccgattcagcatcggccccagcaccttgaaggacgccggagaaacgatatctacgtgcgcgcagtccagctcctgaacccgtaaagcatccacgtagcgagaccacgtctgctgcacgtccatccctcttgcagagtacgtttcgccacaaacagagtcgcctcgccgttaaagcgcgccgtgtgggtcgccgaaagcagccgtactgaatcggcgtaattggcctcgatcttgtcgaacatgccgtgcttgtcgccggcgtcgtctggatccaacgcctcttcggagacggcaataaactgctgcctttcgcgctggatctccttgagcacgttgtcatcaagcatgacgtcccagttctgggtttccggcggataggtgtccagcaacccaagaaacgccacctcttcaccccgtgcctgaaggcgtgccgcgataccctgcgccagcgtgccaccgagcgaatagccgatgaagtgataaggcccgtgcggctgcacgctcagcacggtttgcagatgcgcgtcgcacacttcgtccatattctgactggtgcatagcgggccatccggatgcggcgactggatgccgaccaccgaccactgctggtcgatatagcgtggcaacacgctgaactgccaagagaaaccggatgccggatgcaaacaaaacagcgtgggtccggtgccgctgcgcagcggcagtagcgcctcgaatccacagttatcggcttcagcctgactctgctcttcgctcagtaacgccgcaagctgttcaattctggaggccaccataatctgcccgaccgtgaccggtctactcagctcgcggcgcagttgggcggcgaggcgcatcgcgagcagtgagtggccaccgagtgcaaaaaagtcatcgtcggcgaacacggtttcacggcccagcaacgctgcaaccgtttcggctaccaccgtctccagtcccggctccggctcacgtccctgggtctgctgcgcagattccggctgcggcagggctttacggtccagtttaccgttggcgctcagcggcaacgtcggcagctcgaccaacgccaccggcaccatatgcggcggcaacaggccggttagcgcctggcgcagcgcctcgggatccaggcgcacgtcgggctgagcaaccagataccccaccagctggcgagaatcgccgccggtcgcatcctgccctacgtgacccagggtcagggcatgcgtcaccgcctgcgcgatgccaggcaatgagagcagcgcatggtctatgtcgctcagctcgatacgctgtccacgaattttgagctggaagtcgctgcgcccgaggtactctaccgcgccggtcgacaaccaacgcgccacgtcaccggtgcgatacatgcgtccaccgttgccctgtgggtcggctacgaaacggctggcagtcaggtcagggcgcgcaagatagccgtgtgccaactgcacgccggtcaggtagaggtcacccgcgacgcccggtggtaccggctggaggcgggcatcgagaatacgcagaccggtgttccagaccggcaggccaatcggcacatttgcccgctgacggcggccaaggcctcgccccacgcaggatgccaactcacatcaacggcggcctcggtcggtccataaagattgtgcagcgcgactccagtccgacgctgccacaggcggcacagctcggccggtaacgcttcgccgctgcaaaatacctgacgcagcgaggcacattggcgcactgcgtccggctcttccagcgtgctgacaaacgcggccagcatcgagggaacaaaatgcatcgtggtcacgcggtgagaggcgatcagttgctgaagcagctgaggatcgcgatgcgcttccggcggggccataaacagttttgcgccgacgataagcggccagaaaaactcccagaccgagacgtcgaagctgctcggcgttttttgcagtacgacgtcgtcaccgttcatcgggtagtggttttgcatccacagcagacggtttacgatagcctggtgacctaccaccacgcctttaggcctgcccgtcgaccctgaggtaaagatgagataagccggatgatgaggcgaagcgcccttaaaactctgaggtaaatctgagcttatgctgagaggcgcgtcgtacagcatcacgttgccgaagctggcgaagcgaggcaactggctgttgtcggtaataatcagacgcggcgaggcgtcctccagcatcatcgccagacgatcgtcaggataactggtgtccatcggcaagtaagcagccccgacctcgacgattgccatcagcgccagcgaaaggaatacggatcgcggcaacgctacggcgacgatatctccgggttgaacgccctgttccaccagcctttgcgccagagcaagggtctgttcgcgggtctcgcgataggtaaaataatgctgctcatcggcgagcgccgggctgtcagggttttctcggcctgttgtgccagaagacggctaagggtgttttcctcgaccgggaaggcggtgtcgttgacgcgagccaacagcgcatggtcatcggcgctcagcatattggcatcgccaacccgcagcgcggggttggcagcaaactgttcgagcagcagcggcaagcgtgccaagtgggtagccagctcgtccgcctgataacgttcgccgttggcgagcaagtcgacggtaagctgccccgtctcatcgatataaagcgcaatctccaggtcgcgaaccggtcctgatgccagctcgtgcgtgacaccctccatgccgttgaaatcgagacggaaatcgaacatcttgaagttaaagacagtgccataaagcggctgggcatcgccgatgctgccgacgtcgcgctggatctgctcggcgtcgtagcgctgatgacgacgcgccatcttcagctcacgcgcaatctcagcggccacctcgaccaaggtattctgtggtgcgacgttaaacgccatcggcagcacgttgataaccggtccggtggcgcagagcgcggcggatcccatgcggcgcataaagataaatccggcaccaaattcgttttgcccgctcaaccgtgcgacccacagcgaaaccagcgctaacgccatgtctgaaggcgttaatctgtacgcctcaccggccgcaatgagctgagaaaacggttcgtacgaacaggcctgagacaggcggaaaatatgcgtcgacggcgtctgaccggccaatggctgcgggctgacgctggccgcaggcggcagctgacgtgccttttcaagccagaactccctgtcgcgctgacggacggaggattgctcatactgctgatactcttccacgacctcgcggaaagccacgaacggcgtctcctcgggctgttgctgctgacacaaggcggtatagagatgagcgatgcggcgagcgatggcggtgaagctgtaggcatccacgatcgcatggtggtaacgctggtaccaaaaccaacgatcctcccccacgcggatcagtatgtggcgcaacagcggctgtccgtcggccacacgcagagcgccattgagatcctgacgcatcagcgcgatcgccgccgactcctgactttcagcagtttgctgcccggatgccgcttttgaccgcgcacgatcgtaaagatcgacccactccacggcagggatcgtcgccgtcgcgtcaaaccactgcatcggcacgccgtcttgctcttcaaaacgcatacgcagcgtgtcagcctccgccagcccctgagcaatggcctcactcatgtgctcgcgctcgagcgagccggtcagctcgatatagtgagcaacggcataggcgttatcgtggggagaaagttgatctgcaacccagatacccggctgtgcggccaccagcggcatcatatcgcggctggaagaatgtggttttgaactctgtttgtttggcgtctcagccttcactggctgtcgcttcgaagtcacgtcttgcaccctaagtactcctgataaatagcttatgaagcggcgcgctgcgaggcgggacgcatatcctgccaatggctttccagccagctgatacaatcagcgcgcaatgccggcccaaaaatcggctgccagcccgcaggaatttcgctgaaatccggccacaggcagaactgcttctcctcgttttccaggatcagactgcgctgattttcgtcatcgaaggggttaagcttttccatgctgagctcctgacttgattgaatttaatgaaaaagagagagagggctgacgagcgatgaatttctcggcccaaagcgcctgcaggccgtcaaccaatccaccgcgccagcacagcgcgtcgtgtccgccttcaacgatgcggtaatgcacgctgtgattggagtcctgcagaatgttgaccaggctgtcgttcacctgatgaatcaggccttcatgcctaccggcctccataaatattctgagtgcggcgttctgcccaagtccctgctgcacctgttttggcagccagcaggcgtcttcgggcaccgtgtggcgctgcagcatatcgcgacgcggccaccaaaatgagccggactgggccagcacgcagccaaagcgttgcggccagtgaagcgcggcgtacagcgacgacagcccgccaaagctttgccctgcgactacggttttggacgggctgcgcgtatgaggcgccaggctcgcgacctccggcagcagctcttcctgcacggctaaccagaaatcagggttgcaggtgagctcttcgctgcggtgctgggtgtcgatcgcctcaatcagcacgtacaccgcttcgggcaattttccctgcgccgtttgctgcatcagcggttcccaaatcggcattttctgcgaccagaattggccgtcgagcaggatagccaacgggcgtgatgcgggttctcactttcaccggtggtatagatccacaccttgcgctcattgccaagacgagagctattccactgataacgctgtattttagctggcggtgcgggcatacagagtccgctggaggtggcgtaacagtcaaaatcttgccaggcaggctgggcaggtgcatccggcaggcttacgccggaaagcgcgtggcccttcgcaccgggccagctgcgagttggattcagtagatcatggctcgcgctggcaaaaatgcttctccaccagctgcgcaccgcaaacatacggccgaacgcatcttctgcatcatcgggaacaccgcggtcctcgacgctcgggataaagctgtagctgccgcgccagtcggatttcagttcgatttgccagtgccagacgtcggttccactcaggcgctgtaggctttgaggcggcgatgactgatggtgatcggtaagacagttaatgttgatccagacccgtttgtaggcggaggtaaattcactcccctgcggatcgcgccagaagaaggtgactttgcatcgcccctcaccggagggctctatccagggcgtaccccgtcgagcgacttccagccaccaaccgctgctccctgcatgcttgctgtttaacagcgtttcgctcgctgatgtcgacagcctgtctaaacaatctggtttcaaaacaattactcttgttatgattcaaaaacattaaacggtacagagaatagtattgataattattttcatttgcaatagcgtgtaaccaaccatgaaaataacggcgtgatgttttgtgcaggattgacgctaacgcgggtaacttgctggcagtgttagtttttgaggggatattgttaggcttaattctgactccgcgtgccaaacacacggagtcagtcgaggcgaacctattggctcatcgcagattttttcttcatttcatctttcttcatcttgcctttagacatcgaatctttggacatagaatctttggacatagaatccttagacatcgcgtctttagacatccccatactgtctttcttgaccactggctttttcatcgcatcctcagcgtgtgcgcccatcatgcccaacatcaatgttgaagagatcaaaacagcgattaactttttcatagtatttccttctaaggtaagaaaatgcacagagtgtgcagggtcattcagaattcgtctttagctaccgccaaaccagttgtacccctgatcctcccaatatccgccgggataggcgttagtcacctcaatcaccttgatatgttttggattcttgtagccaagcttggtcggcattcttaatttcatagggaagccatactgacgcggcaaaatctgaccgtcataagtcaatgccagcaacgtttggggatgcagcgcagtcgccatatcaatgctggtgtaatagtcatcagcgcatttgaagctcacgtatttagcattgagatccgcaccgaccagcttcaagaaagttgaaaatggaacccctccccacttaccgactgcgctccagccttctacacagatatgacgtgttatctggctgacctgagccatctgataaagttgagtcagcgaccaactggatttgtccaatatattgcccgctatctgcagacggtaagtctgggcatccacctctggagcctcctcttcgccgtaaaatgcgttaaaaggaaaggggcgagttatcatcgattcggcatattccggtgccagacgatccgcgccaaagagccacgcctgtactctgtcgttaaagccggaaattgcaaccaaggccttttccacactgctgttatcgctgatatcacagcccgtgagcatcaccatcccgccaagcgtcaggccctgtcgcaaaaaatggcggcgggaggttgactcgagcttacgagcaatcaagcgctgagcctcatggatcacgtcctgcgtatcggcattcggaataatgattttgctgtctttttttctcatgatggcctcagcgtccgcgcagcattgccagtaatgttctgggtaccaacatcaccataattaaatggacggcgacaaaaccgaccatcgctgacatggcaaaaaagtgtacgtagcgagcagcatcaaacccgcccatcaaggttcttaataatggaaactgcaccgatttccacaccaccagcccggagaccaccaacaggacgccatccgccatgacgaacagataagcaacgcgctgcaccgtgttgtaatgacgtaaatcgttgtgcgccagcttgcctttcacggcggcaagaagatcgtcccacagtgcgcgcggggttaccggaaagaattttttctgtaatcggccggtggcaacgttcatcaggagataaaaaaggccgtttatgccgaataaccacatcccggcaaagtgccattgaatggcgcccccagccagccgccgagcgttatggttttcgaaaactcaaagtcgaacaacggcgaggcgttataaatttgccatccgctggtgaccataatcaatattgccaacgcattgatccaatgcgctaaacgcagccataaagcgtggatattttgctgtcctgcgggcagtaaaggtgtggtatgcagtgccatcatgcactccctgactcagcggtttcgatggggagagtattaagccgatttgttccccaagacctcacgcaaagttaaataaaatgtgataactccaacggatgaccttgtgtagactgcaaggtaatgcacaggttttaaccacctcagggccagtaatggaaaagaataaaaagatcctgattgtcgaagacgacagtaatattgctgaacttctgacgcttcatctcactgacgaaggttatgaaataacccatgcgcccgatggcaatctgggcgtcgcgctgctggaaaaagggggatgggatgcgttaattctcgatttaatgctgccgggcatcgacgggctcgagatttgccgtagggcgcgcaatatgacgcgctataccccaatcatcatgataagcgcacgctcgagcgaagtgcatcgcgtactcgggctggaacttggggccgacgactatctcgccaagccattttctatgctggagttggttgctcgcgttaaagcattattccgccgtcaggaagcgatgggacgtaatctgcaaatggatgcaggcacgctgagttttaaagggctggttattgatcccatttccagagaagtgctgcttaatcagcagagtatcgagctcacacctcgcgaattcgacctgctttatttctttgccaggaatccaggaaaagtattctcacgcctcagcctgcttaatcaggtatggggctatcagcatgaaggctatgagcatacggtgaacactcatatcaaccgcctgcgcatcaaaatcgaggccaaccctgccgagccagaaaggatcctgaccgtatggggtatgggctataagttcatgctctccagcgatgaaaaccaggggtaaaccgtgaaaaatatgacgctatcgcagaggttaacgctggtttttattgtgctgctggtcgcctgcggctcaatctcagggtatttgcaggtacggtcgagcaatcaatatagccaggcggttattcaacgcctttcgcagaatctggccaaacacatcgccgagagcaatcccctgctgagtcagaacggattaaataatgcctcggtgcacacgcttttcgatcaactgatggcggtcaaccccagcgttgaggtttatctcctcgataaacagggaaaaattattggcgatgcggcacccaaagggtcagtaaaaaggacgcatgtcaatttgcagccggtacaggcgttattgcagggtgccaaaatgccggtctatggcgacaacccacgaagcgcagacagcgcttcactccaggtctttagtgccgccccactgatcgacaatgggcaggtgcaggggtacgtctatatcgtattattgggcgacgaggttaccgcgttggataaagacgcccagtttcactgggccgtgctgatggcggtgcgttcaatggggctggttattttatttggattggtggccggtgccatcgcctttcgttgggtgacgcgtcccatccgccgattgaccgagcaggtcagcaatctggacagcggcgggatggaggctgtgcaacagctatctaaaacgattgcctcccccaaggcccgcgtgacgaggtttttctgctgcaacaggcgtttatcaagatggccaagcgcattgacgaacagtggcaaaggctcacccgtcaggaccagcagcggcgggagtttatcgccaacatctcgcatgatttgcgtaccccgttaacctccctgcatggttatctggaaacgctgtcggtcaaatcagagcagctaagcgacgaggagcgaaaccgttatctgaacattgcgctggtgcagagcagaaaggttggccgtctagctcaagagctttttgaactggcgcgcctcgaatatggtgtggtcaaaccgcaaaaagaacccttttcgatgggcgagttggttcaggacgtgtatcagaagtttgagctcaccgcagagacacgtcatctgatccttcgtgcggatatctcgccaggcatccctttggtgaatgccgacctggcgttgatagagcgtgttatgactaatctgctggataacgccattcgtttcacccccgattacggcaccattgagattcgtctctggcagcagaaagagaaggtagtggttcaacttaacgacagcggaccgggcattgccgcagagctgaaagaagacttgttcattcgcccctcaattttgagtaccggtcgaaaacgagccggcggcttaggcttgatgatcgtaaaacgaatactcgaattacacggcagcaatattgcgctgattgagcagcccggcaaaggtgcctgttttgaattttcggtgccactttaacgccgatgttttatgcattgtataagtgccgtgaatcattttgattgaggaagtgcaacgaataagcgatggtaagtctcccttatacgtcaggagagacgacgatggatacgccttcaaaaacgttgctagctcagccacttaacccaggcgaaacgattggatttttttcgccctcttcccctgtcactgtcaccgccccgaaccggtttgcgcgcgccaggcagttcgttgagagcaagggcttcaggctaaaagcgggacagctgacgcataaggcagacttctaccgcgcgggatcgatacaggagcgggcagaagagctgaatcagctgctgcgcgatccgcaggtacgctgtgtgatgtcgactatcggcggcatgaacagcaattcgttgctgccctacctcgactatgaggcgattgaggccgatcctaaaattattatcggctattcggacaccaccgcgctgctactcggcatttatgcccaaacggggctgattactttttacggtcccgcgctggtcgcctccttcggcgagtttcctcctctggttgataccacctgggattccttcgcacagatactggtcacgccacccgccttgccttacgcctatcccttaccgcctttctggagcgacgaacgtctcaactgggataacctggtgcccgaacgtcctaaacagtgctatgacaacgactgccgcttcctgggtaacgggaaagtttccggcagagtgctaggcggcaatttgaatacgatgtctggtatctggggcagtccgtatatgccggagatcggacagggcgatattttattgattgaagacagcctgaaggatattgcgaccgtcgagcgtgcgttctctctgctgaaaattaacggcgttttcgaccgcgttgccgccattttgctgggaaaacacgagggatttaatgattccgctaccgggcgtcgtccgatagacgtattacttgaggtgctcggtgaccacgttcctcccatggtcgatggctttgactgttgccacacacatccgatgctgactctcccgttaggcagccaaattcagatcgattttgagagcaataagattgaattaatttcaccttatcttattcatcaatgaccgttgattaacgagtcaccactttgcgtgatctgccacccaaaacctaaacaaagcccgggtgcaaactacaattaacctttgattgacatagtattaacgtattcctaaggagaaaaatgatgagccaatcccacaagcatcctattcctgcgtctattgcagaacgaactctgatcacacccgagaaatatcagcaatattatcaacagtctgtgcaggatcctgaggcattttggggcgagcaggctaaagtgctggactggatcaaacctttcaccctagtaaaaaacacctcgtttgcaccgggcaacatcgatattcgatggtttgaagacggtacgctgaatctggccgcaaactgcctcgaccgtcacctcgccgaacgaggggatcaggtcgctatcatctgggaaggcgacgatccgaaggccgagaacaaatttgtgacctacaggcagctgcacgaagacgtgtgtaaatttgccaatgtattgaaagaccatggcgtgaccaaaggtgacgtggtggctatctatatgccgatggtgcctgaagctgccgtcgcgatgctggcctgtgcacgcatcggcgcggtgcattccgttatctttgccggtttctctccggaagccgtatctggccgtattatcgactctaacgccaagctggtcattactgccgacgaaggcctgcgtgccggtcgcactattccactgaagcaaaacgtcgatgacgcgctgaaaaatcctgccgtcgtcagtgtgactaacgtgattgtttaccagcgcaccggtaagaaaggtgagtggaaagaggggcgggacctgtggtggcatgacgttatcgccaacgcttcggctgagtgtccaccaaccgagatgaaggctgaggatccgctgtttatcctttacacttccggctcgaccggcaagccaaagggtgtgcttcacaccaccggcggttatctggtttatgccgcgctgaccttcaaatacgtcttcgactatcaccctggcgacgtctattggtgtacggcggacgtgggctgggtaacaggccacagctacctgctgtacggcccactggcggtgggcgcgattacgctgatgttcgagggtgtgccaaactatccgaccaccaaccgtatgtctcagatagttgataaacataaggttaacattctctataccgctccgaccgccatccgcgcactgatggcagagggcgataaagccattgaaggcaccagccgcagttcgctgcgtattctggggtcggtgggtgaacccattaacccggaagcctgggagtggtattacaagactatcggcaacagccagtgccctatcgttgatacctggtggcagaccgaaaccggcggttttatgattaccccactgccgggtgcgaccgagctgaaagccggttcggcgacccgtccattcttcggcgtgcagcctgcgctggtcgataacgagggcaatccgcaggaaggtgcaaccgagggtaatctggttatcaccgattcctggccgggacaagcgcgtacgctattcggcgaccacgagcgcttcgagcagacctatttctcaaccttcaaaaatatgtatttcagcggcgacggcgcgcgtcgtgacgaagacggctattactggataaccggccgcgttgatgacgtgctgaacatctccggtcaccgtctgggcacggcggaaatcgagtccgcgctggtttcacatccaaaaattgccgaggcggccgtggttggcttcccacacagcatcaaagggcaggctatttatgcctacgtcacgctgaatcacggtgaagaaccgtcgccagagctctataccgaagtgcgtaactgggtacgtaaagagatagggccgatcgctacaccggatattcttcactggaccgattcattaccaaaaacccgctcgggcaagattatgcgtcgtatcctgcgcaagattgccgctggcgacaccactaacttcggagatacttctaccctcgccgatcctggcgtggtcgataaactgctggaagaaaaacaatcaatgaaagcgtcgtcataattttcaccgcttcagcgcggtgaactcaatcaatgcctcataggagtggtgtagatgaatgatctcatttatcaaaaggttgaaagtaacccgcgctttaaagaattggtgcaaaaacgcagccggttcgcctggctgctttctggcattacgctgttgttgtacgttgctttcatctttcttatcgccttcgaacccgggtggctgggcacgccgctgtatgccggtgcgaccatcacccgtgggatcccggttggcgtagggctgattgttatctcttttgtactgacaggaatctatgtgtttcgtgccaacggcgagtttgatcgtctgacggccgatatcatccgtgaggtgcaaccatgaacgcgcgtcgtctgggcgttctggcctctctggcgttgagctctaccgcctgggccgctgagggcgttggcggtgaagttaaacggcagccgctcaacgttgaagctatcatcatgttcgtgctgttcgtgggcgcgacgctgtatatcacctattgggcttctaaacgcacccgctctcgtcaggactattacaccgcaggtgggcagattacgggcctgcaaaacggtctggctatcgcgggcgactttatgtctgccgcatcttttcttggcatctccgcgctggtttacacctcgggatatgatggacttatctactcaattggttttctgattggctggccgatcattctgtttcttatcgccgaacgtctccgcaatctgggcaagtatacttttgctgacgtagcctcctaccgcctgaagcagaaaccgattcgtactctatcggcctgcggctcgctggttgtcgtcgcactgtatctgattgcacagatggtcggtgcgggtaagctgattcaactgctgttcgggctgaactatctagtggccgtggtattggtcggtattctgatggtgctgtacgttctctttggtggcatgctggccaccacttgggtacaaatcatcaaggccgtgctgctactggcggggcaactttcatggcaattatggtcatgaagtcggtcggctttaactttaatacgctgttctctcaggcggttgccgtgcatccgaaaggggtagcgatcatgagtccgggagggttggtatctgacccgatatcggcactgtccctcgggctggcactgatgtttggtaccgctggcctaccgcatatactgatgcgattcttcacggtgaatgatgccaaggaagcccgcaaaagtgtgttctatgccactggttttattggttatttttatattttgacctttattatcggcttcggtgctatcgtgctggtcagcgccaatcctgccttcaaagatgccagtggtgtcctgctcggcggtaacaatatggcagcggtgcatttggctaacgcggttggcggcagtttcttcctcggttttatctcggcggtggccttcgcgacaattctggccgttgtcgctggattaacgttagcaggcgcttctgcggtttctcatgacctttatgccagcgtcatgaaggacggtaaggcaactgaattagccgagctgcgggtgtcgaaatctaccgtagtggtgctgggtttcgtcgcgatcgcactgggtattttgtttgaaaaacagaatattgcgtttatggtcggattggcgttctcaattgcggcaagctgtaatttcccgattattttactgtcgatgtattggtccaaactgactacgcgcggggcgatgattggaggctggttagggttgctcactgcggtcattttgatgatccttggcccgacaatttgggtacagattctgggccacgccaagccaatttacccgtatgaataccctgcactgttctcgatgattgttgcttttgtcggcatctggttcttttcgattaccgataaatcggcagaaggacagcgggaaagagagcttttttggccgcagtttgtacgttctcagaccggtattggcatttcgcagagcagtaagcactagataacgcccacaaattctccaaaaaagaagccctcagtcgcgagactgagggctttttgttctttatttgatggctggcagtttatgcatgacttcgccataccccttcgggccgctgcaagcaacaaaaaaaccccagtctttcgactgaggtttctctgtttatttgatgcctggcagttccctactctcgcatggggagaccccacactaccatcggcgctacggcgtttcacttctgagttcggcatggggtcaggtgggaccaccgcgctactgccgccaggcaaattctgttaatttaccgaactctacgctttgtttctggtgctgatacccagagtcgaactggggacctcacccttaccaagggtgcgctctaccaactgagccatatcagcatactaatctacaacaacatcgtgctggtcaaatcacagcgagatgtttaatttgatgcctggcagttccctactctcgcatggggagaccccacactaccatcggcgctacggcgtttcacttctgagttcggcatggggtcaggtgggaccaccgcgctactgccgccaggcaaattctgtttcattccaaccgctttccacattcctgcaggccgccatcagaaccaatctttgaacaagctgatttcttgaaactttcgtctcgtctctctaaaacaccttcggtgttgtaaggttaagcctctcgggtcattagtactggttagctcaatgcatcgctgcacttacacacccagcctatcaacgtcttagtcttaaacgtcccttcaggggactcgaagtcccagggaagactcatcttgaggcaagtttcgcgcttagatgctttcagcgcttatcttttccgcatttagctaccgggcaatgccattggcatgacaacccgaacaccagtgatgcgtccactccggtcctctcgtactaggagcagcccctctcaatcttccaacgcccacggcagatagggaccgaactgtctcacgacgttctaaacccagctcgcgtaccactttaaacggcgaacagccgtacccttgggacctacttcagccccaggatgtgatgagccgacatcgaggtgccaaacaccgccgtcgatatgaactcttgggcggtatcagcctgttatccccggagtaccttttatccgttgagcgatggcccttccattcagaaccaccggatcactatgacctactttcgtacctgctcgagccgtcactctcgcagtcaagctagcttatgccattgcactaacctcacgatgtccgaccgtgattagctaaccttcgtgctcctccgttactctttaggaggagaccgccccagtcaaactacccaccagacactgtcctcaccccagattatggggccgagttagaacatcaaacattaaagggtggtatttcaaggttggctccacgcagactggcgtccacgcttcaaagcctcccacctatcctacacatcaaggctcaatgttcagtgtcaagctatagtaaaggttcacggggtctttccgtcttgccgcgggtacactgcatcttcacagcgagttcaatttcactgagtctcgggtggagacagcctggccatcattacgccattcgtgcaggtcggaacttacccgacaaggaatttcgctaccttaggaccgttatagttacggccgccgtttaccggggcttcgatcaagagcttctccttgcggataaccccatcaattaaccttccggcaccgggcaggcgtcacaccgtatacgtccactttcgtgtttgcacagtgctgtgtttttattaaacagttgcagccagctggtatcttcgactgtcttcggctcgggaagcaagttcctccacctagcgacagcgtgccttctcccgaagttacggcaccattttgcctagttccttcacccgagttctctcaagcgcctgagtattctctacctgaccacctgtgtcggtttggggtacgatttaatgttacctgatgcttagaggcttttcctggaagtgcggcatcaactacttcatcaccgtagtgactcgtcatcacgcctcagggttacagtaaaccggatttaccaggtctacacccctacacgcttaaaccgggacaaccgtcgcccggctagcctagccctctccgtcccccttcgcagtaacaccaagtacaggaatattaacctgtttcccatcgactacgcttttcagcctcgccttaggggtcgactcaccctgccccgattaacgttggacaggaacccttggtcttccggcgtgcgggtttttcacccgcattatcgttacttatgtcagcattcgcacttctgatacctccagcaaacctcacagttcaccttctacggcttacagaacgctcccctacccaacaacgcctaagcgtcgctgccgcagcttcggtgcatggtttagccccgttacatcttccgcgcaggccgactcgaccagtgagctattacgctttctttaaatgatggctgcttctaagccaacatcctggctgtctatgccttcccacatcgtttcccacttaaccatgactttgggaccttagctggcggtctgggttgtttccctcttcacgacggacgttagcacccgccgtgtgtctcccgtgataacattcttcggtattcggagtttgcatcgagttggtaagccgggatggcccctagtcgaaacagtgctctacccccgaagatgaattcacgaggcgctacctaaatagctttcggggagaaccagctatctcccggtttgattggcctttcacccccagccacaagtcatccgctaatttttcaacattagtcggttcggtcctccagttagtgttacccaaccttcaacctgcccatggctagatcaccgggtttcgggtctataccttgcaacttgacgcccagttaagactcggtttccctacggctcccctatacggttaaccttgctacaaaatataagtcgctgacccattatacaaaaggtacgcagtcacctaacaagtaggctcccactgcttgtacgtacacggtttcaggttctatttcactcccctcgccggggttcttttcgcctttccctcacggtactggttcactatcggtcagtcaggagtatttagccttggaggatggtcccccatattcagacaggatgtcacgtgtcccgccctactcatcgaactcacaatttatgcgcttttgtgtacgggactatcaccctgtaccgtgcgaccttccagacgcttccactaacacacaaactgattcaggttctgggctgttccccgttcgctcgccgctactgggggaatctcggttgatttcttttcctcggggtacttagatgtttcagttccccggttcgcctcgcatggctatgtattcaccatgcgataatgtgacgtatcacattgggtttccccattcgggtatcgtcgggtataacggttcatatcaccttaccgacgcttttcgcagattagcacgcccttcatcgcctctgactgcctaggcatccaccgtgtacgcttagtcgcttaacctcacaacccgaaggtgtcttataaactcataaagagtgacaacattcgaggctgtgattatttgagagactctaatacaggtgcgcataactcagtacttctacggagagttatgttcagctgtatcatttcaatttttcagcttgttccagattgttaaagagcaatatcttaaacacgactcgttaaagtcatctttaagataaattctgacccgctaaggtacagagtgataatgtctttcacacattatcggcgtggcgtccccaaggggattcgaacccctgttacagccgtgaaagggcagtgtcctaggcctctagacgatggggacacgaaaatgccgcaccaggtgataaaacccggcgcttctttcgtatcagcgtaaggtttcccttactgcatcaacaggtagcgcttgctcgtttacatctatcagacaatctgtgtggacactgcacaatgcgtatcttgaggtaaggaggtgatccaaccgcaggttcccctacggttaccttgttacgacttcaccccagtcatgaatcacaaagtggtaagcgccctcccgaaggttaagctacctacttcttttgcaacccactcccatggtgtgacgggcggtgtgtacaaggcccgggaacgtattcaccgtagcattctgatctacgattactagcgattccgacttcatggagtcgagttgcagactccaatccggactacgacgtactttatgaggtccgcttgctctcgcgagttcgcttctctttgtatacgccattgtagcacgtgtgtagccctactcgtaagggccatgatgacttgacgtcatccccaccttcctccggtttatcaccggcagtctcctttgagttcccaccattacgtgctggcaacaaaggataagggttgcgctcgttgcgggacttaacccaacatttcacaacacgagctgacgacagccatgcagcacctgtctcagagttcccgaaggcactaagctatctctagcaaattctctggatgtcaagagtaggtaaggttcttcgcgttgcatcgaattaaaccacatgctccaccgcttgtgcgggcccccgtcaattcatttgagttttaaccttgcggccgtactccccaggcggtcgacttaacgcgttagctccggaagccacgcctcaagggcacaacctccaagtcgacatcgtttacagcgtggactaccagggtatctaatcctgtttgctccccacgctttcgcacctgagcgtcagtctttgtccagggggccgccttcgccaccggtattcctccagatctctacgcatttcaccgctacacctggaattctacccccctctacaagactctagcttgccagtttcaaatgcagttcccaagttaagctcggggatttcacatctgacttaacaaaccgcctgcgtgcgctttacgcccagtaattccgattaacgcttgcaccctccgtattaccgcggctgctggcacggagttagccggtgcttcttctgcgagtaacgtcaatcgttgcagctattaactacaacgccttcctcctcgctgaaagtgctttacaaccctaaggccttcttcacacacgcggcatggctgcatcaggcttgcgcccattgtgcaatattccccactgctgcctcccgtaggagtctggaccgtgtctcagttccagtgtggctggtcatcctctcagaccagctagggatcgtcgcctaggtgagccattaccccacctactagctaatcccatctgggcacatccgatggcgtgaggcccgaaggtcccccactttggtcttgcgacatcatgcggtattagctaccgtttccagtagttatccccctccatcaggcagtttcccagacattactcacccgtccgccgctcgtcacccagagagcaagctctcccgtgctaccgctcgacttgcatgtgttaggcctgccgccagcgttcaatctgagccatgatcaaactcttcaattaaaagttcgatttgctgaaacaagttcagcgatgctcaaagttacttcacatcattcataatgaattactgcttggtcactctaagacttgatattttttgccaccgaggtggctgatatcgtcttgtgagtgcccacacagattgtctgataaattgttaaagagcagtgagttacgcgctttcgcttgctaactcgaggtggcgtatattacgctttcctcatttgatgtcaaccgtttattttcgcggtcatcatcatttttaattctttccgacttgttcacaccgcgttgctgctgcgttgttccctgtcgatggagcggcattatagggatcccgatttattccacaagtgttttttgatcttttaattccgactgcctgtttttcgctcctttcgtggagttcttgtgcgatgaggcggttttatcaacgatcctgtggggcaaaactttgtattcattgatccaaagactatattgccagaagcgatcgttctcataagagggataaagatgtctgactttttacgttcatataaaggaatgcgcccaaaactgggcgaaagagtgatggttgatcccaccagcgtggtgattggtgatgtggatctggcagatgacgtcagcatttggccgttggttgctattcgaggggacgtgaataacgtagtgattggctgtcgtagcaatatccaggacggcagcgtactgcatgtgacgcatcagtcggctcacaatgccgagggcttccctcttattattggagaagatgtgacggtaggacataaggcaatgctgcacggctgcacggtaggtaacagggtgctggtcgggatgggatcgattgttctcgatggcgcagtaatagaagatgacgtgatgattggtgctggcagtctggtaccgccggggaaaagactggagagcggctatctttatctgggcagcccggttaaacagattcgcgaactaacggcggcagaaatcgcggggcttacctactcatcaaacaactacgttaaatggaaggatgaatacctgtctggagaagacaagtagcccccttcttattacccaggggatcggcaaacgatcccctgatgaattatactgccaaatcctgcttcaactgcgctaatacaggttcaatttccggcatcacgccatgccataaattgaaagcatgtgcagcttgccccaccagcatccctaaaccatcagccgtttgctccgcaccgtgctgttttgcccaggcaatgaacggcgttgggccagcctgatagaacatatcgtaaatgcgggtttgcggtgtgatgactgatgaaggcacggcaggcacctcgcctttaatcccggatgcggtcgcgttgataactaaatcaaacgattcgccgcctaggtctgccagcgcaatggcattgatatcgcctttggcttcgaaaattgtatgcaggtgctgagcacgctcgaaggtgcggttagtcacaacaacgcggcaaccgaagtccagcaacgggagaataacgccgcgcgccgcgccgcctgcgcctaccagcagaacgcggtcgcctgacttgagcatccccagacgctgaagatcgctaatcatgccgatgccgtcggtgttatcgccaagcagtctgccatcatcaagcttcttcagtgtgttgactgcaccacttagtgcagcgcggtccgatagctcatccgactcggcaaacgcgcgttccttaaatggaacagtaatgttcgcaccttttgcgccattggcaaaaaagccgcgcagcgtttcttcaaactcttcatgcggcgccaggacggtaccgtactggtgtgctatccctgtctgctccgcaaagagagcgtgaatgcgcggtgatttgctatgactgattggattaccgaatacagcaaaagatgacatgacagctttccttaaccttgacgtataagttcgccggtggcagcgtctttgatttcagacggattttcgcgcccaccgacgagaccttccaataccgggaagtctggcccaaactgctgcttaacggcatctgccgtgcggcaaggggctgagcgctgagattcgcactggttgaaaccagaggtttaccatactggcgacacagttgttttactaaaggatgatcgctaacgcggacggcaagcgagctgaagcgtccggtgagccattgcggtgtatcaggcttggcaggcatgacccaagtcaccgggcctggccaggtggcaaagatctgctcgcgtctttcggcgctcagctgagagtcatcgatataaggtaagagttgctcgtagctgtcggcaatgaggatcaggcccttttctctcggcctctgtttaagagccaaaagtgcctcgacggcgtattcactatcaggatcgcaccccaggccaaatacggcttcggtaggataggcgataacctgctggttttttaatgcctgcaagatgacaggcaaattgagttcattttctttattcatatcgttttcaatctattgtcactacggctttgccgcaaagcttactggcacaaaaaagtttaatgccctgcgccgttttcttttccattaataatggatactggcagaactcacagctccccgcgaccggcttgttattaataacaaactggcagtcgggataacggttgcaggcgtgaaacgctttgccgaaccgcgatttacgctgcaacaaatgcccctgaaagcactgcgggcaaggcacggtagtctcttcaggtttatcgataacttctatatggtcacattccggatattcggagcagccaataaacatgccgaatcgtccctgtcgtagtaccagagtcgcctgacatttagggcagtgttgaccatcaaggattttaacgatgtgtccatcggcctgagcttttagcgggcgaatatgctggcattcaggataattggagcagccgagaaaagggccgtggcgaccactacggatcaccaaatcggccccgcattccggacagatttcattttgcttcccagcaaaaagcgttgctttcgtcatactctgtgttttacccgttacctgaatcagaacgctctaatgcagataaccttcattaacatcaaatagcagctcttccatttgctgataagcactttcatatcctggaatattgaagagaaccatcaacacgacccatttcagatcttcaagatcgaactcgtcggtatccagagccataacacgatcgacgaccatctccctggtatcgacattcaacaccttaatctgttccagaaatagcaggaatccccggcagctgacgtctaatcgactcatttcttcatcggtataaactctcagagcaaaagggtctgcatccagcatatgcgatggtgtaccgccctcttgcagatcagcaagtttttcaagccaatttaacgcgttgtggatatcggttcggtgaaatccagcttcggttaaatcatctgttagcctatcttggtcgacactcatctccgcttcgttgtgaatgtaagtttcaaataagtacattagtacgtcgaacatggcctgccctcctaattcggacatagccgccggatacagctgcgatccatcctgctaactccagttcgagcagttgtcctgcaacgactggcacaggttggccggcacgttcggcgacgacgtcaacaggtgtcacctcatatcctacgttagccaacacatcgacaaatggcaattcaacttcggtatcttccgcacaaatatttgcgtcaggggcaattttttctcttataaggctcggattgccaaaaaatgacgaattctcgacgctaagccaggtcagaccgctaccaatatgctcggcaatatcgagtgggtctgtcaccagatatgcccctgcttgataagccaatgtgcgccctcactattgggattatccactgagcccggcagtgcaaacacttcccttccctgctcaagcgcacagcgtgcagtaatcagtgaaccactgcgcaaagaggcttcgacaatcagcacgccgacgctcaggccgctgataatgcgattacgccgcgggaagttatgcggcagtggcggtgtctcaagggaaaattcagaaaccagcacgcccccgttttccagaatgcgttccgccagcgggatgtggcaacggggatgaacatgctgcaacccgtttccaagcaccgcgaccgttttcccctgtgcttcaagcgttgcgcgatgacagattccgtcaatacccatcgccagcccgctggtaagggtgaaaccgctgttaaccagtcgtgcagcaaagtattgcgcccaatgttcgccgtaatgactgcagttacggctgccgaccatcgccagctgcggtgaagcgagcaactctggcgggcctttgacgtaaagcagccttggcggtgaggcaatctgtttaagcaaagagggataagcggggctattaagcgcaacgagatgatggccttcccgctcggcccatcgcagggaagcgctaatatctaacgaacgaggatggaaaaaagcgcttatctgagcctcggtcagccccagcgaacgaagcaaggcaggcgtgtgccggggagtttctgccaaacagtcggccagttgacataacctcatgacacctagcccttttacctcagacaacctgagccacacttcccgctgtgccatgttgattatttcccgttaaacgccgtgctggcgctttgctcaattgatagacgatgctgtcaatcagagccggaaatgtctagaatagagattatatatcgtcaatcctttgaataaagatccagagatttatgtccgtattacaaatattgcatttcccagacgacaggctgcgcattgttgctaaaccagtcaaagaagttaacgccgaaattcagcagatcgtggatgatatgtttgaaaccatgtatgccgaagaaggcatcgggctggccgcgactcaggttaacatccaccagcgcatcatcgttattgatgtgactgatgataagagccaacagcttgtgctaatcaaccctgaactgcttgagcaaagcggtgaaacgggtatcgaagaaggctgcctgtctattcccgatcagcgcggtctggtccctcgtgcggccaacgttaagatccgtgcgctcgaccgcaacggcaagagctttgagcttgaagccgatgaactgctggctatctgtatccagcacgagatggaccacctggttggtaaactgttcgttgattatttatcgcctctgaagcgtcagcgtatccgtcagaagatggaaaaactggcaaaactcaacgctcgcggctaatcgctgcgcgctgcgttgtgtcattgcaggtcagatttctggccatgcgctactggctactcattacaggacacggactttgcggataattttcgccggtacacctgattttgcagcgcgtcatcttgacgcgcttctaacttctgagcaccaaatcgttggcgttttcactcagcccgaccgcccggcaggacggggaaacaagctaacgccaagcccggttaagacactggccttgcagcacgacctcccggtatttcagcctaaatcactgcgccctgaagagagccagcagtgtgtcgcctctctgcaggccgatgtgatggtagtcgttgcctatgggttaattctgcctaaggccgtactggcgatgccgaagcttggctgtatcaacgtgcacggttctctgctgcctcgttggcgcggcgcggcacctatccagcgttcgctgtgggccggtgatgccgaaacgggtgtcactatcatgcagatggacgtcgggcttgataccggcgacatgctctacaagattcactgcccaattgaggcagaagatactagcgcctcgctgtatggcaaactggcagacctcggcccacagggcatgctgcataccctgacgcagctcgaacagggtacgtccaagcctgaagttcaggacgagtcattagtgacctacgccgaaaagctgagcaaagaagaggcccgtctggattggtccctcggtgcagagcagctcgaacgctgtgtccgcgcctttaatccgtggccggtaagctattttgttatcgaagagcagccggtaaaagtctggcaagcgcaggttatcgatagcaataacagcgcagctaagccgggcactgtcctggcggctgacaaaaaaggtattcagattgccactgcgcagggcgtgctgaacattacccagctccagcctgcgggtaaaaaaccgatgtctgctcaggatctgctgaattcacgcagtgaatggttcacgccaggcacgattttaaactaacaacgccacccggcatcatctttaccatctggatgccgggttctgtactcttcttctctttatttatgctggctacggtcggtatgctgactgaggtcagcttttttaactatgaaaaacgcatataacctccgcagcattgctgcaaaagccataagccaggttttggatcagggccagtcgctgtcgaccgtgctgccgggtttgcaaaaaagcatcgcagataaagacagagcgctgttgcaagaactgtgttttggcacattgcgcgtattgcctcagctcgaatggtgcctgcaacagctgatggcaaaacccttgactgggaaacagcgtacgctgcactacctgctgatggtcggtctataccagatgctgcatacccgcattcctgcacatgccgtgttggcagagaccgttgaaggcgccgtggcgctgaagcgtcctcagctcaaaggcctgataaatggcgtgcttcgtcagttccagcgtcagcaggttgatctgatgcagcgcgtcgagaatactgacaaccgttatctgcatccaagctggttattgaagcgtattaaaaatgcctaccctgaccagtggcagcatattgttgatgccaacaatcagcgtccgccaatgtggctgcgcgtaaaccgtcagcatcatacccgcgaggcttatcttgccctgctgatcgaagccggcatcgaagcgcatccccatcctgaatatcccgacgcgctgcgtctggaaacgccgtgcgccgtcactgcgctgccgggcttcgaacaaggctgggttaccgtgcaggatgcgtcggcacaaggaagcgttagcctgctctctcctaaagacggtgagtcaatcctcgatctttgctgcgcaccgggcggaaaaaccacgcatatccttgaagctgcccccaaagcgcacgttctcgcggtcgacgtcgatgaaaagcgtctccttcgtgtacatgaaaacctgcaacgcctcggcctgcatgccgaagttaagcaaggtgacgggcgtgagccacacgtctgggcgaccggaaaaacctttgacaaaattctgctcgatgcgccctgctccgcgaccggcgtcattcgccgtcatccggatatcaaatggctccgtcgcgacagcgatatcgccgaactggctcgcctgcaggcagaaattcttgaagctatctggccatgcctaaagtcaggtggcgtgctggtttatgccacctgctccatcctgccggatgaaaatagcgagcagatttccgcgttccttaaactgcaccccgatgcgcaactggtagaaacgggcagtctcaatcaaccggggcggcagaatcttcctgatgcgcagagtggcgatggcttctattacgctaagctgattaaaggctaacgtcttttcgacgacccttgacgacatttaaggcaatacagagagtgctatgaaaataataattctcggtgctggccaggttggcggtacgctcgcggaaaatctggtgggtgaaaacaacgacatcactatcgttgataccaatacaacgcgtctgcgccagctgcaggacaagttcgatctgcgcgtcgttcaggggcacggatcccatccgcgggtgctgcgcgaagcgggtgcagaagatgccgatatgctgatcgcggtcaccaattcggatgaaaccaatatggtggcctgccagatagcctattcgttgtttaacacgcctaatcgtattgcgcgcatacgctctcccgaatacattcgcgagtcagagaagcttttccagcctgaagcggtgcccattgatcacctgatttcgccagaacagctagtcattgactacatctacaagcttatcgaatatccgggtgcgctacaggtggttaactttgccgaaggcaaggtcagtatcgcagcagtaaaagcctattatggtggaccgctggttggcagcgcgctgtcggcgatgcgcgaacatatgccgcatatcgatacacgcgttgcggctatatttcgtcaggaccgtccgattcgtcctcaagggtcgaccattatcgaagccggtgatgaagtatttttcgttgccgcttcgcagcatatccgtgcagtaatgagcgagcttcagcgcctcgaaaaaccctataaacgcatcatgattgtcggcggcggtaacgtcggtgcaggtcttgcacgtcgcctcgagaagaattacagcgtgaaacttatcgagcgcgatcaacagcgcgcggccgagctggcggagctgctacaggataccatcgtgttctacggcgatgcttctgaccaggaactgttggctgaagagcacgttgagcaggtggacgttttcatcgccatcaccaacgatgacgaggcaaacatcatgtcggcgatgttggcaaaacgcatgggggccaagaaggcaatggtgctgattcagcgcagcgcctacgttgatctggttcagggcagcgttatcgatattgctatttcaccgcagcaggccacgatttccgccctgctgggccacgtacgcaaagccgatattgtcagcgtttcatccctgcgccgcggtgtggctgaagccattgaggcgattgctcacggtgatgagagcacgtctaaagtggtaggccgcacggttgaacagattaaactgccaccgggtaccaccatcggtgccgtggttcgcggcaatgaggttatcatcgctaatggaacaacccgcattcagcagggtgatcatgtggtgatgttcatcaccgataaaaaattcgttcgtgatgtggaaagactgttccagccgagtccattcttcctgtgaacagtttacttaagtgaaatttatcaactaaataagcatttatcgttaactttggtagcggattggctccaaatagtctttactttgactgacataaatatggatttgccaaggagttagtttatgagttttttgaaagagtttcgtgaatttgccatgcgcggcaacgttgtagacttggcagtcggtgtaatcatcggtgcagcatttggcaaaattgtttcatctttggttgccgacatcattatgcctccgctgggtctgctgattggtggggttgatttcaaatccttccagtgggtactccgcgatgctgtaggaacgacgcccgccgtcgtaatgcattacggtatctttattcagaacatttttgacttcctgattgttgcattagctatctttattgccatttcactcatgaacaaaatgcgtaagaaagaagaagcagcgccggccaaacctgctgacgacgtcgtattgcttaccgaaattcgtgatttgctgaaagaccagcagacgcctaagctttaaataacgaataaaaactaaaaagccatcgcatgtcgatggcttttttattgcttgaacgggaagagcagttttaacgattttatgcggccattgccgtaaaaccgttaagactgccctcccagcttgctgccttaccttttttatctttccgactatagctgccttttcctttcagattcttttctactcgttgacggaacagcggatcgtgcagcaatgcctgaacggcgttgtcttgaataacacctttcttatgttgataatcgctcatgttgacctctttgtgtgattgaactgcagcaccgtggctgcgatgacaaatttatgcccaattttaccgttttgcaatatccccactggctccattttcgagcgcctcaatgatagaacaactgcgactcgagtgttcgccgccacaacaggctgcactgagacgctgcagtgaatcacgcatgcggattagttcagtcagcttatgttcaacctcggcgagacggctatcaacgatcgatttggattcctggcaggtatgatgcgccggatcgatacggatcgacaataactcaccgatcgtctccaacgtgaagccgatcgttttcgcatagcgaatgaagcgcagcctctgaagacagttttcggtgtaaagacgataacccgcttcgctacgttcaccgagcgacatcatgccctgtttttcataatagcgaatggtatcgggcgtcacgtcagcaagcttggctaattcaccaatcttatacatattatgctccattcaggtgattctgtagcttttcacggtaaagcctgtcgtccaggaagtcagtattcatccctgcctgctgtagccgtagcctgagaacctttaaacgcttttcagcctgaacatgatcgtcagacccctcggcaacctgctccaacaacgtctggaggtccaatgcctcttttcggtcctgaatctctgcggggacatatcccgcatttttgaggatacgataagcaacgcgcagctccctgggaacaccactgtcgtcatccagcaccaaaggagcgccggcaccgggaaggttgtcgaactcacctctgctttgtgcatcaaggatctgtctttctgcccattggtcactgagaaacatagggtctccttcaaactttgacgggtacgggaactagcatagcgcgatggacgtaaagagggaaatagcggtgaccggatcggttgcattgcggtgtatcaaaattcaggcgtaaaaaaaccgggcacttaggcccggtcttttcatgcatctacagattattcagcagttgctacttctgcttttgactctgcacgatcaacgagctcgatgtatgccatcggcgcattgtcgcctgcacggaaaccacacttcagaatacgagtgtaaccaccggcacggctcgcgaaacgcgggcccagttcattaaacagttttgccacgatctcgttatcacgagtacgggcgaatgccagacgacgatttgcaacgttgtcggtcttggcaagagtaatcagcggctcaacaacgcgacgcagctctttcgctttcggcagggtcgtcttgattatttcatgacgaaccaaagagccggccatgttacggaacatagcctgtcggtggctgctgttacggttcagttgacgaccactcttacgatggcgcatgaccttatccttctcagtaaaaccttaacctgtgatccggttactcgtcagcaatacttgccggtggccagttttccaggcgcatgcccagagacaaaccacgggaagcaagtacgtctttaatctcagtaagagattttttacctaagttaggcgtcttaagaagctcaacttcggtacgctgtaccagatcaccgatgtagtggattgcttctgctttgaggcagttagcagagcggacagtcaattccagatcgtcaacagggcgcagcaggattggatcgaactccggcttctcttctttgacttctggttgacgtacatcacgtaaatcaacaaaagcttcaagttgttcagcaagaatggttgccgcacgacggatcgcctcttcaggatcgatcgtaccgttggtttccatttcgataaccagcttgtccaaatcagtacgctgttctacacgcgctgcttcaacattgtaggcaatacgctctacagggctgtagcatgcatctactaacagacgaccaattgggcgctcatcttcttccgaatgaattcgggcagacgccggcacataaccacggccgcgctgaactttgatacgcatgctgatagcagcgttttcatcagtcaggtggcagataacgtgttgcggcttgacgatttcgacatcaccatcatgggtaatgtcggctgcagtcacagggccaatgccagacttattcagggtaagaataacttcatctttcccttgaactctcaccgccagccctttcaggttgagcaggatttccaggatatcttcctgtacgccttctttggtgctgtactcatgcagtacaccatcaatctcaacctcggtcaccgcgcaacccggcatggatgaaagcagaatacggcgcagtgcgttgcctaaagtatggccaaagccacgctctaatggctcaagggtcaccttggcgtgcgtcgaactgacttgctcgatatctaccaggcgcggttttagaaactctgtcacagaaccctgcattgtgtcctctctttggtactaagctttacttagagtaaagctcgacgatcaggtgttcgttaatgtcagctgacagatcggtacgttcaggattacgtttgaactgaccttccatcttagcagcatcaacttcaagccaagtcggcttttcacgctgttcagccaactccaaagcggccttcacgcgagattgctttttagctttctcacggatgctgacaacgtcattcggagatacctgataagaagcgatgttgacaacgcgaccgtttaccataacagctttatggctaaccagctgacgtgactctgcacgcgtagcgccgaagcccatacggtaaacaacgttatccagacgaccttccagaagttgcaacaggttttcaccggtgttgcccttcaggcgggctgcttcttggtagtagttacggaactgacgctccagaacaccgtaggtacggcgaactttttgcttttcacgtaactgcacgccatagtcagacagacgcggtttacgcgcaccgtgctgaccaggagcttgatcaatcttacacttggtatcgatcgcgcgaacaccagatttaaggaataaatctgtgccctcacgacggctaagcttgagcttaggacccaaatatcttgccattttctctctccaacaatcctaaaagcagcgttatacgcgacgctttttcggcggacgacaaccgttatgagggataggagtcacatcagtaatattagtgatgcggaaaccagccgcgtttaacgcgcggatagtagactcacgaccaggaccaggtcctttaaccataacttccagattcttgataccgtactctttcactgcatctgcacagcgctctgctgcaacctgagctgcgaacggagttgatttacgggaaccacggaaaccggaaccaccagctgttgcccaacccaaagcattaccctgacgatcggtaatagtcacaatggtgttgttgaaagacgcatggatatgagccacgccgtcagagacttgttttcttacacgcttgcgtgtacgaacaggtgcctttgccatttattcaatcaccccgattatttcttgatcggtttacgcggacccttacgggtacgtgcgttagtcttggtacgctgaccgcgtactggaagaccacgacgatggcgtaaaccacgataagttccaaggtccataagacgcttgatgctcagggtgacttcacgacgcagatcaccttcaacaacgaacttggcgacttcgtcacgcagcaattcgatttgctcttcagacagctctctgatcttaacattttcggcaataccagacgcagcacagatagcctgtgaacgggttttaccgatgccgtagatcgaggttaacgcgattacggtatgtttctgatcaggaatgttaatgcctgctatacgggccactatgcactcctactatttatatacggcaacaccattctgaaaagcccgttttcaggatactcaaatagtgatgcagcttacatacaaaagattggctggctaatctagccagctcaacccaactttgcaagaaaaatatgcgagataatcagccttgacgctgtttatgcttcggctcggcgctgcagattacgcgaacgacaccgttacgcttaacaactttgcagttacgacataatttcttgacggaagcacgaactttcatttttactctccgttacttcgcaaactcaccagattagcgattatagcctttcaggtttgctttcttcagcgcagactcatactgacttgacatcatcagagtttgcacttgagccataaagtccatgatgacgaccactacgatgagcagtgatgtaccgccaaagtagaatggaactttcattgcatcacgcatgaactccgggataaggcagatgaaagtaatatacaacgcaccaaccaaggtcaggcgggtcattactttatcaatatacttcgccgtttgctctcccggacgaattcctggtacaaatgcaccggacttcttcaggttatctgctgtctcacgcgggttgaaaaccaacgcagtataaaagaaacagaagaagatgattgcagtagcatagagtaacacataaagcggttgcccaggctgcaaatacagcgaaattgttgtcagccagttccaaccggttccgccaccgaaccatgatgctatcgtggccgggaacagaatgatgctggaagcaaagatagcaggtattacgcccgccatgtttactttcaacggtaagtgtgtgctctgtgctgcataaacacgacgaccttgttgacgtttggcatagttaacgacgatacgacgttgaccacgttccataaacacaacaaagaacgtcactgcaaacactaagactgcaaccaacagcaacaggaggaagtgcaggtcgccttgtctagcttgttcgatagtatgaccaacggctggcgggagacccgctacgataccagcaaagattataatcgaaataccgttaccgataccacgctcagtaatctgctcacctagccacatcaggaacattgtcccggtaaccaggctcacgactgcagtaaagtagaatgaaaggcctgggtttaataccagaccttgcataccaggcatattcggtaaaccggtagcaataccgatcgactggaatacggccaaaaccagcgtaccgtagcgggtgtactggctaatcttacgacggccagcctccccttctttcttaatttctgccagcgctggatgaaccaccgttaacagctggataataatcgatgccgaaatatacggcatgatccccagagcaaagatcgaagcacggctgagagcaccaccagagaacatgttaaacatttcaatgatggtgcctctttgctgctcgagcaatttagcaagtacagcggcatcaataccagggatcggaataaaagagccgatacggaaaacgattagcgcaccgataacaaacaaaagtctgcgcttcagctcgccaagtccacctttagcactttgaaaatctaatcccggttgctttgccatctgctacttattcctctattttaccgccagcagcttcgatagcagcacgagcgcctttggtgacacgcagaccacgtacggtaaccggacgagcgacttcgcctgaaaggattactttcacgaattcgatctggataccaactacgttagcggctttcagcgtgttcaggtcgataacgtcgccttcgatcagagccagttcagacagacgaacttctgccgtgatcatagctttgcgagaggtgaagccgaatttcggcaaacgacgatataaaggcatctgaccaccttcaaacccgcgacgtacgccaccgccagaacgtgagttctgacctttgtgaccacggccgccggttttacccaggccagaaccaataccacgacctacacgcctaggcgcttgcttggcaccatcagccggagacagagtatttaaacgcatctcttactcctcaaccttaaccatgtaggaaacaagattgatcataccgcgtacagcaggagtatcctcgcgctctacggtgtgaccaatacgacgcagacctaaaccagtcagagtttgcttgtgtttcggcaaacgaccgatgctgctttttgtttgagttactttaatagtctttgccatggttatttccctagaatttcttcgacggacttaccacgcttggcagcgaccatttctggggacttcatatcttccagagctgcgatagttgcacgaaccacgttaatcgggttagtagaaccataagctttggctaatacgttgtgtacccctgcgacttccaggacggcgcgcattgcaccaccggcgataataccggtaccttcggaagccggctgcatgaacacgcgagaacccgtgtgagcacctttaacagggtgctgcagggtgccgctgttcagcgcgacattcaacatgttgcgacgggctttctccatcgctttctggatcgctgccggaacttcgcgtgctttgccgtagccaaaaccaacgcgaccgttaccatcaccaactactgtcagtgcggtaaagctgaaaatacggccaccttttacggttttggatacgcggtttaccgcgatcagcttttcctgcagttcgccagcttgtttttcgatgtgtgacatcttacacctctaccttagaactgaaggccagcttcacgggcagcatctgccagtgcctggactcgaccatgatattggaaaccagaacggtcaaaggaaactttcgaaatccctttttccaatgcgcgttcagcaatagctttacctacagcagtcgcagcatctttgttaccggtatacttcaattgctcagtaatagctttttctactgtagaagcagatgcaattacttcagaaccgttaggtgcaatcacctgtgcgtaaatatgacgcggggtacgatgtaccaccagacgtgtcgcacccagttctttgagcttgcggcgtgcgcgggtcgcacgacggatacgagcagatttcttatccatagtgttaccttacttcttcttagcctctttggtacgcacgacttcgtcggcgtaacggacacctttgcctttataaggctcaggacgacggtaggcacgtaagtctgcagcaacctgaccaatcacctgcttatcagcgcctttcagcacgatttcagtttgagttggacattctgcagtaatgcctgccggcagctggtgctcgaccgggtgagagaagcccagggccaaactcaccgcgttgcctttaatggcagcacgataaccaacaccaaccagttgaagctttttagtgaagccgtcggtaacacctacaaccattgcgttcaacagtgcacgagtggtacccgcttgggcccatgcgtttgcaaaaccgtcgcgcggagcgaaggtcagtgcgttttcttcctgtttaacttcaacggcgtcatggatagtacgtgacagctcgccgtttttacccttaatcgtaataacctgaccgttgagttttacctctacgccggcaggaatgacgacgggtgcttttgcaacacgagacatgctttcctcccgattaagctacgtagcagataatctcgccaccaagaccagcctggcgagctgcacgatcagtcataacacctttagaggtagaaataacagcgatacccaaaccggccattacctttggcagctcatcttttttcttgtagatgcgcagaccaggacggctgatacgttgaatgctctctaccacagccttgccctggaagtacttcagtactaattccagttcaggtttggcgtcgccttcgattttaaattcttcaatatagccttcttctttaagcacgttggcaattgccactttcagcttagaggaaggcatggtgaccgcaactttgttcgcggcctgaccgttacggatacgggtcagcatatccgcgatcggatcttgcatgctcatctgtcattactcccgtgattcaattggtgacaattaccagctagcctttttaagacccggaatttcaccgcgcatagcggcttcacggaccttaatacggctcaacccgaacttccgcaagaaagcgtgcggacgaccagtttgacggcagcggttacgctgacgagacgggctggaatcacgcggcagagtctgcagcttcagaacggcatcccaacgatcttcgtcggaagcgttcacgttagagatagtcgctttcagttcagcgcgtttagcgaagaacttgtcagccagtttcacgcgtttgacttcgcgtgctttcatggattgcttagccattagtaaccctaccttacttgcggaacgggaagttaaaggcagccagcagagcgcggccttcatcatcggatttcgcagtagtggtgatggtaatatccaaaccacgaacgcgatcgactttgtcatagtcgatttccgggaagatgatctgttcacgcacgcccatgctgtagttaccacggccatcgaatgacttagcggacaagccacggaagtcacggatacgcggtacagcaatagagatcagacgctcaaagaattcccacatgcgttcgccacgcagggttactttacagccgatcggatagccctgacggattttgaagcctgcaactgatttgcgtgctttggtgatgaacggcttttgaccggagatagctgccaagtcagctgctgcgttatccagcagtttcttgtcagcgatcgcttcaccaacacccatgttcagggtgatcttctcgacccgagggacttgcatgacagaattgtaattaaactcagacatgagtttctttacgacatcgtctttgtagtaatcatgcagtttcgccatcgtactactccaaattacttgatagttacgctgttagacttgaagaaacggacttttttaccgtcttcgaatctaaagcctacacggtcagccttaccggttgccgcgttgaagattgcaacgttagaaacctgaatagcagcttctttttcaacgatgccacctggttggttcagggccggtacaggcttctgatgtttcttaaccaggttgataccttcaacaatgacctttccagaagacaggacattttttactttaccacgcttacctttatctttaccggtaagcaggataacttcgtcatcacgacggattttcgctgccatggttcgctccttagagtacttctggtgccagagagataattttcatgaacttctcattacgcagttcacgagttaccggcccaaaaatacgcgtgccgattggctgctcgctgttattatttaaaataacgcatgcattgccatcgaagcgaatgacagaaccgtccgggcgacgaacacccttcttggtgcgcaccactaccgccttcagcacgtcgcctttcttcaccttaccgcgaggaattgcttccttgatggtaattttgatgatatcgccaacgcctgcgtagcgacggtgcgagccacccagaaccttgatacacattacgcgacgtgcaccggagttgtcggccacggtcagcatagtctgttcttggatcatgttagtgctccgctaatgtcaactacaactttaagacctaggaatataggccattaagaaatccccacaaatgagggcgcggcattataacaccggttgctcattatgggtagaaaaaataaacggcccaggtctccatgagccgcttattcattttcgagtttgcgattctattacagaattgctttctctacaacgcgaaccagtgtccaagacttagtcttagacagcggacggcattcgctaatttcaacgacgtcgccgataccgcattcgttgttctcgtcatgtacgtgcagcttagtcgtacgcttgatgaatttaccgtagattgggtgtttcacgaaacgctcaatcgcaacaacgatagatttttccatcttgtcactgatcacacgaccttgcagagtacggatcttgtcactcattacgcgcccgccttctcagtcagtaaagtcttcacacgtgctacgtcacgacgcacttgcttcaacgtgtgtgtttgctgcagctggccgctggccgtttgcatgcgcaggttgaactgctcacgcaacaggttcagaagctcagtgttcagctcttccacgctcttttcacgcagctcttttgctttcattacatcaccgtcttagttacaaaggtggttttaataggcagtttcgctgctgcaagctggaatgcttcacgcgccagctcttcaggcacaccgtccatttcgtacaggactttaccaggctggatcagggcaacccaatactccacgttacccttacctttacccatacgaacttcaagtggcttctcggtgattggtttgtccgggaatacacggatccaaatcttaccttgacgcttaactgcacgggtcatcgcacgacgtgctgcttcaatttgacgagcagtcaggcgaccacggccaacagctttcagaccgtaagtgccgaagctcacatccgtaccttgcgcaagaccacggttgcggcccttgtgcaccttacggaattttgtacgctttggttgtaacatcagcgactctccttacttgcggcctttacgctgctgctttttaggttgagcagccggttccggttgttcaactgcagccataccacccaggatctcacctttgaagatccataccttaacgccgattacaccataagtggtgtgcgcttcagatgtgttgtaatcgatatccgcacgcagagtatgcagtggaacacgaccttcacggtaccattcggtacgcgcgatttcagcaccgccaagacggccgcttacttcaactttgatacctttagcgccaagacgcattgcgttctgtacagcacgcttcattgcacgacggaacataacgcgacgttccagctgtgaagtgatgctgtcagcaaccaatttagcgtcgagttccggtttacggatttcggcgatgttaatctgtgcaggaacgccagcgatatccgctacgaccttacgcagtttttcgacatcttcacctttcttgccgataacgatgccaggacgagcggtgtgaatagtcacacggatgctcttcgctggacgctcgataacgatgcgagaaacggaagctttcgacagttctttagtcaagaactgacgaactttaaagtcgctgtccaggttgtcagcgaattctttggtattcgcgtaccaggtagaattccaaggtttgacaatacctaggcgaataccattaggatgtactttctgacccattgctagtctccagagtctcagcgatcggacacaaccacagtaatgtggctggtgcgcttcagaatgcgatctgcacgacctttagcacgcggcataatgcgcttcatgcttgggccttcgtctacgaaaattttcgtgactttcagatcatcgatgtcagcgccatcgttgtgttctgcgttagcaatggcagactccagtaccttcttaaccagaccagcagctttcttgttggtgtaggccagagtttccagagcttgcgacactttcttaccgcggatcaggtctgcaacaaggcgaaccttctgagcagaagaacgagcgtggcgatgtttagcgatagtttccatctcttcctcctaccttagcgctttttagcttttttatcagccgcatggccgcgataagtacgagtcggcgcgaattcacccagcttgtgaccgaccatttcatcggaaacaaacactggtacgtgctgacgaccattatggacagcgatggtcaaaccgatcatgttaggaaagatcgttgaacgacgggaccaagtgcgcaaaggcttcttgtcaccgctttccaccgctttctctaccttcttcagcaagtgcaggtcaataaaaggacctttcttgagagaacgtggcatggcttatcctctaattattttttgctacggcgacgtacgatgaacttgtcagtacgcttgttgctacgggtcttcttacctttggtctgaacgccccatggtgttactgggtgtttaccaaagttacgaccttcaccaccaccgtgtgggtgatcgactgggttcatcgcagtaccgcgaacggtaggacgaataccacgccaacgtgcagcacctgctttacccagaacgcgaagcatatgttcagagttaccaacttcacccatggtggcgcggcagtcgatctgaactttacgcatttcgccagagcgcagacgcagagttacgtaggaaccatcacgagcaacgatctgaacgtaggcaccagcagaacgagccagctggccgcctttacctggtttcatttctacgttgtgaaccgttgaacctactgggatgttgcgcatcggaagggtgttacccactttgattgcagcatcaacgccagattggatctggtcacccactttcaggcctttcggcgccaggatgtaacggcgttcgccgtctttgtacagaaccagcgcgatgttcgcggaacggttcggatcgtactccagacgctcaaccactgcagcgacaccgtctttgttgcgtttgaagtcaaccagacgatagtgttgcttgtggccaccaccgatatgacgggtggtgatacggccattgttgttacggccaccgcttttgctcaatttctcaagcagcggagcaaaaggtttacccttgtgcagctcagggttaaccactttaacaacgtggcgacgacccggagatgtaggtttacatttaacaattgccattgttcttactcctccgacttactctgcgccgctgatgaagtccagattctggccttctttcagggtcacgtaagcttttttccagtcgctacgacgaccaacacgctgaccgtgacgtttagacttgcctttaaccagcaaggtgttaacgtcttcgacttcgacttcaaacagtttcttaaccgcagctttgatttctgctttggtcgcgtcgagggcaactttgagtacgatggtgttgttcttttccatcgcagcggatgctttttcagaaacgtgcggcgcgcgcagcactttcagcagacgttcttcacgaatcatgccagcatctcctcaacttgcttaactgcgtcagcagtcataaccactttgtcgaaggcgatcaggcttactggatcgatacctgctacatcgcgaacgtcaaccttgtacaggttacgtgcggccaggaacagattctcgtcgacttcgccggttacaatcagcacgtcttccagagccatgtctttcagtttctgtgccagcagcttagttttaggcgcttctacagagaacttctcgacaacgatcaaacgatcttgacgtaccagttcggacaggatgcttttcagcgcgccgcggtacatctttttgtttactttttgactgtggtcctgtggcttcgcagcgaaggtcacaccacctgaacgccagatcgggctcttaacagaacctgaacgcgcacggccggtacctttctggcgccatggtttctttccagaaccagttacttcagcacgggtcttctgagcgcgagtaccttgacgggcacctgctgcatacgcaacaacaacctggtgtaccagcgcttcattgaaatcacgcccgaaggtagtttcggaaacagtcagcgcgctctgcgcgtctttcactactaattccattcctatctcctcgacgttaagccttaacagcaggtttaacgatcaggttgccaccggtagcacccggaacagcacccttgaccagcagcaggttgcgctcagcgtcaacacgtactacgtccaggctttgaacggttacacgctcgttacccagttggcctgccattttcttgcctttgaacactttgcccggagtctggttctgaccgatagaacccggaacgcggtgtgacaaggagttaccgtgagtagcatcttgagtacggaagttccagcgtttaacagtacccgcgaaacctttacctttagatgtaccagtaacgtctactttcttaacgtctgcgaaaatttcaacgctaatgtcttgacctgcagtgaactcttcaccttctgcaaggcggaattcccacagaccacggccagcttctacgccagctttagcgaagtgacccgcttctggtttggttacacggttagcttttttgctaccagtagtaacttggacagcgcggtaaccgtcgttttccagatctttgatctgagtaacgcggtttgcttcaatttcgataacggttacagggatagaaacaccatcttctgtgaagatgcgagtcatacccactttcttaccgactaaaccaatcattgtttcaacctctcaatcgctcaatgaccctgattaacccaggctgatctgcacgtctacaccagcagccagatccagacgcatcagagcatcaacggttttctcggttggctcaacgatgtcaaccagacgcttgtgagtgcgaatctcatactgatcgcgcgcatctttattgacgtgcggagaaatcagaatggtaaagcgctctttgcgggtcggcagcgggattggaccacgaacttgcgcaccagtgcgcttcgcggtctcaacgatttccgcagttgattgatcgatcaaacgatgatcaaacgctttcaggcggatacggattctttggttctgcatgagaccagagctccaattattttaaacgtaaaatgattactcctcggtcccatttcgattgatgggagagtgtaatcgttcttcacataacccccatatcgggagtattgtttgccagacggttattttgtctgacaactaattcatatcgaattaggcttaccaagattaggtaagcccgcgcattatacgtaactcaccaaacatagcaacccctcctgacaataaagtgcgtttatttcgtacaccctgcccttctcgcgagagtgacacaggttgataaacggcatctatgaccgcagctacgggagttttacaaatggcggcgtgaagtagctgaattgggttagagtattttcccttggggcgatatctgcgctgacagtgagaatagcgatgctggcactgggatttttcggcttgaggaggtgctgttgagaaaggctaaggggagttttatatcagccagcgagtatgcagcctggctgatcccttatgcatggtctgcgtaacgattaagtaaagagagactagtgggacgcttttgctgattcttctttaatctgggtctgaatgtaattttgaatacccacgcgtcctatcaggtcaacctcggtttctatccagtctatgtggtgctcttcatcggccaaaatagtaatcatcaggtcgcggcttacatagtcatgaatggaatcggcataggcaatggcctcacgtaaatctttggcaccgtcgagttcaagcaccagatcagacttgagcatctcctcaacgtcttcaccgatattaagcttgccgagatcttgcagattgggaatgccctcaaggaacaggatacgctcgatgtagatatcggcgtgtttcatttcatcgatggattcatggtattcaatgccgttaagtcgcattaaaccccagttcttgaacattctggcgtgaagaaaatactgattgatggcaacaagctcgtttccaagcaacttgttgaggtgcgaaatcattttggtatcgcctttcataggaatcccctccgctataggttctaagagtgtagaaccacttagcaaagagtgaaagaaatacccctactaattatcaggcgacctcgatgatgtaagtggcgttatcttgctcctctaccaagatctccctggcttgtctgatgcatttaccacagtcagtcccaatcgggcaaagttggcgaagctctttcatcgtttgtggctgatgctgttgaacgactttgcggatcactttatcagtgactgcgttacacaaacacacgtacatacgggaactcaatattcaatcaattcacataactgtaaatgagaatcgtttttatttcaattctgtttgtagaaatttacattgtcacttctgctgaaaacgggcaaaaaaaagggtgcctaagcaccctcttttatattcctaaatttatcagcgattaagcgataactttagcaacaacaccagcgcctacagtacggccgccttcacggattgcgaaacgcagaccgtcgtccatcgcgattgggtggatcagggtaacaaccatgttcacgttgtcaccaggcattaccatctcaacgccttctggcagttcgatggtaccggtcacgtcagttgtacggaagtagaactgtggacggtagcctttgaagaacggagtatgacgaccgccttcatctttgctcaggatataaacttctgagtcaaatttggtgtgtggtttgattgaacctggtttagccagaacctgaccacgttcgatgtcttcacgcttgataccacgcagcagaacaccaacgttctcgcctgcacgaccttcgtccagcagtttacggaacatttcaacgccagtacaagtagacttaacagtgtccttgatacccacgatttcaacttcttcaccaactttaacgataccgcgctcaacacgaccggtaacaacggtaccacgaccggagatggagaatacgtcttcgattggcagcaggaacggcttgtcgatagcgcgctctggttctgggatgtaagaatccaggaaaccagccagttcgatgattttagcttcccactctggctcgccttccagtgctttcagcgctgaaccacgaacaactggcaggtcatcaccagggaagtcataagcagacagaagttcacgaacttccatttctaccagttccagcagctcttcatcatcaaccatgtcacatttgttcatgaatacgatgatgaaaggaacgccaacctgacgacccagcaggatgtgctcacgagtctgtggcatagggccatcagtcgcagcaacaaccaggatagcgccgtccatctgagcagcaccggtgatcatgtttttaacgtagtcggcgtgccctgggcagtcaacgtgcgcgtagtgacgtgatggggtgtcatactcaacgtgggaagtgttgatggtgataccacgtgctttttcttctggtgcgttatcgatctggtcgaatgcacgagcagaaccgccgtaggttttagccagaacggtggtgatagcagcagtcagggtagttttaccgtggtcaacgtggccgatagtaccaacgttgacgtgcggtttggaacgttcaaatttttctttagacacggatatattccttactattgtgctctcccctcaaggagagagcacgggatcattgtgttaaaaacctaggcttatttaccacgggcttcgattacggcctgtgcaacgttgcttggcgcgtcatcatacttcaggaattccatggagtaagatgcacgacctttggtcagtgaacgcagctgagttgcataaccgaacatctcggaaagcggaacttcagcgtgaatcacaacgccagtcgcgttagattcttggcctttcagcataccacgacgacggctaaggtcaccgataacgtcaccagtgttctcttctggagtttctacttcaaccttcatgattggttcaagaagcacaggttttgctttcttaaagccatctttaaaggcgatagatgctgccagtttaaacgccagttcagaggagtcaacgtcatggtaagaaccgaagtgcagacgcacgcccatgtccactaccgggtaaccagccagcgggccagatttcagctgctcctggatgcctttgtcaatcgcaccgatgaattcaccaggaattacaccgcctttgatttcgttgacaaactcgtagcctttagggttaacacccggctcgagtgggtacatgtcgataacaacatgaccgtactgaccacgaccaccagactgcttggcgtgtttaccttcgatgtcggtaactttggcgcgaatcgcttcacggtaggctacctgcggcttaccaacgttagcttcaacgttgaattcgcgacgcatacggtcaaccaggatgtccaggtgaagctcacccatacctgcgatgattgtctgaccagattcttcatcagtccaaacgcggaatgatgggtcttctttagccagacggcccagagccagacccattttttcttggtcagctttggtttttggttctacagctacggagattaccggctctgggaattccatacgctcaagaatgatcacgttgtccggatcacacagggtatcaccagtagtcacgtctttcagaccgatcgctgcagcgatatcgcctgcacgaacttctttaatttcttcacgcttgttagcgtgcatctgaacgatacgacccagacgttcacgctgagatttcactgggttaaatacagtgtcacctgagttgacgagaccggagtaaacacggaagaacgtcaagttacccacgaatgggtcagtagcgattttgaacgccagagcagagaacggctctttgtcgtcagaatggcgaactgctggagtgtctttaccgtcgtccaacataccgttgatagcttcaacgtcggttggtgctggcagatactcaacaacagcatccagcattgcctgtacgcctttgtttttaaacgcagaaccacaggtaaccaggattacttcgttgttcagaacgcgcttacgcagagaagctttgatctcttcttcggtcagctcttcgccaccaaagaatttctccatcagctcgtcagaaccttcagcagcggcttcaaccagtttctggcgccattcttcagccagttcttgcatatcagctgggatctcttcgtattcgaaggtcacgccctgatcttcttcgttccagttgattgctttcatcttgacaaggtcaacaacgccggtgaatttctcttctgcgccgatagccagctgcagaggaaccggagttgcattcagacgctgttcgatctgaccaacaactttcaggaagttagcacccatacggtccattttgttaacgaacgcgatacgaggaactttatatttgttagcttgacgccatacggtttcagactgtggctgaacgccgccaacagcacagtaaaccattactgcgccatcaagaacacgcatagaacgttcaacttcgatggtgaagtcaacgtgtcctggggtgtcgatgatgttgatgtggtgtggttcgaactgcttagccataccagaccagtaacaggtagtcgcagcagacgtgatggtaataccacgttcctgctcctgctccatccagtccatggttgctgcgccgtcgtgtacttcaccgatcttgtggtttacaccggtgtagaacagaacacgttcggtagtcgtcgttttaccggcgtcgatgtgagcgctgataccaatgttacggtaacgctcaatgggtgttttacgagccatttgattcctctattactagggcgttcaagttcagttaatccaaacgggctaactgttgccagcgcccgcttgtttagcatatacccgcaatctttcaaatcgcagatgcgtaagccgtttcgctcaccccggtccattaaccatgtaaattcccgggggtcttccaactgccgtctttctgcaagttgaaatcttggggtatctacagcgggtaattaccagcggtagtgggcgaacgccttgttggcttcggccatacggtgaacgtcttcacgtttcttaacagcagtacctttgttgtctgctgcatcagaaagttcgttcgccaggcgcagagccatggatttatcaccgcgtttacgagcagcttcaacgatccaacgcattgccagagcattacgacgaaccggacgtacttcaactggaacctgataagtagaaccaccaacgcggcgggacttaacttcgacggtcggacggacgttgtccagagcgacttcgaaagcttccaggctgtctttaccgctacgttgagccagggtctcaagtgcgttgtagacgattgcttctgcagtagattttttaccatctaccatcaggatatttacgaatttagccagcagttcggacccgaacttaggatctggcagaattttacgttgaccaatgacgcgacgacgtggcatgggaatactccgttgttaattcaggattgtccaaaactctatgagtttattttgacagtaatgtgaaaatgtttggccttacttaacggagaaccattaagacttcggctttttaacgccgtatttagaacgagactgcttacggtctttaacgcctgaacagtccagtgcgccgcgaacggtgtggtaacgcacacctggcaagtcttttacacgaccgccacggatgaggatcacggagtgttcctgcaggttatgaccttcaccgccgatgtaggaggtaacttcaaaaccgttagtcaaacgaacgcgacatactttacgcagtgcggagtttggtttttttggagtggtggtgtacacacgggtacaaacgccacgtttctgcgggcaagcttccagcgctggaacgttgcttttagcaaccttcgtagagcgtggtttgcgtaccagctgattaattgttgccattaaaaagctcctggattttgtttcgtaaactactttgtaaacacgtgataaatcgacccacgatcggcagatgccaatatgggacgcagaattttattgctgacccgtgaaagtgtcaagaaatatacaacaattcgcgaaatcaccatgcgacgtgttggcgatgcttctcggtcaaatcaacgaatccagtatagtcgatcggcgtcactttgtgtgaaatttgaccagacaggccgcgggcctgcaggtcttcgctgagcacatacaccggacaagtcagaacagatatatgggactgtgccaggctgttttcaagcgcggccgtcacaccgtcctgcataagcagtaaggcatccgtgtcactcaccaggcgcataagtgccggtaaatcacattgttgaggagaacgggcaagggtaaaaagcatagtcttttcccgatcaaaaagtcatgacaacgtcataggaagccagcttctggcgcaatacatcaggtgagagccgttctacatccagcacccaatcgtcatattctgccagcccacgctcctgtgcagatgcgccacagataaagcattgttcaacgtcataaagcggcaatacgccataagtagcaatataatcacgcgctaaaattttttccggctgctggcccttgagcagctgcagcacaccgtcggccacgaaaaagacgccaatgtcttcactgagcgccgaggtcgcgagcagtgcgtccaacccttctctgccggcagacgtgccgtgtggtccttgtgaaaacacaaaggccactctttttacttggttttctgccttcatgtttcggcctgttcctgacgcttaaaactgtatcagccgatcgcagaccaacgcggcttccgcgagactgcctaatccggtcaacgcgaaacctggctgcagattgggatatttgtcttcatggtgggtggcctcatcggcgtccatcaccccgcgacgcagcgcggcggcgacgcagacattaagttcaacctcatgggcgtgggccaactgctgccatgcgcgcaccaggtcaaattcgtcggaagccggtgaggtcagccggttgccgttaagcacaccttcacgatagaaaaaaacgctgtcgagtttgtgtccacgggcgagaagcgccagagcaaactgataggctgcgctggcctgctgggtgccatacggcgccccagtgaccaaaatgctgtatcgcaatgtcaacgctaattccccaacggctcgccacttttgaactggcgaatatacagataaaccgtatgtttggagatattcaggcggtcggcaacctggttgattgcgtctttgatatcaaaaatgcccttctcatacaggttgagtaccacctgacgattcttggcattgttagtgacgttacggtccgcgttgacttcttcgatggtgaactcgagcgtttgcgcgacgagatcgtccacggaggaggcaaagttgacggaaggcgagacgtcctgcgtttccggcggcataaaggtttgcatgatctgcgagaacggcacgtcgaggttcatgttgatacacagtaaaccgatcacacgctgatcgcggttgcgaatggcgatagtgaccgacttcatcagcacgccactttttgcacgggtaaaataggctttagagacattgctgtctgcgcccgtcatatcgtgcagcatgcgcagcgccaaatcggtgataggcgagcctatcttgcgaccggtatgttccccattggcgattcgaatagccgagcatttcagatcttccagagaatgcagaactatttcacagtgttgcccaatcagcatggccaaaccgtctaccaccgcctcgtaggaggtcaggatttcatggtcggttgcactaaaaggacgttggtccagcaaatccagttcaccggtttcgccatttaaaagcgaattagacattgaagctaccaccctctacatcgtgagctcactcatcatctggaatgaggctctccgttcaatcaatctcagcaggccctaatgtaacaaagctgcagcgaaaaaggtgcctacgattattcaagttattgacgttaagctcgagcgataaagtcgtcaagctatcatcatagagtaaccccagtaaaaatggggaggaagcgctcacaaagatgacggtaaaaaaaaaccgccgcataagcgacggttttcttgggcaaaaatcagaaaaatttattctgatttagcagcgtcagcgtcagccggtttggtcgcatctttcgcgtcagcttttggagccggtttgatatccagcaattctacttcgaataccagagtagagttggcagggatacctgggacgccagttttaccgtaggccaaggccggtgggataaccagcttgatttttccgcctttcttaacgtgcttcagaccttcggtccagcctgggataacgccgtcaagacggaaggacagtggctcgccgcgggtgtaagagttgtcgaactcggtgccgtcaaccagggtacctttgtagttcacaactacggtgtcgctgtcttttggcgtagcgccggtacctggtttctcaacctgatacagcaggcctgactcagttttcttcacgcctttttctttagcgaagtcagcgcggaatttatcgcctttgtcttcgttggctttagcgtctgcttccattttctgctgggcagaagcttttactttagcttcgaagctttgcagggtcttttcgatgtctgcgtcagacagcttgctcttgttcgcgaacgcgtcctgaacaccggcgatcagctggtctttatccagtttgatgcccagtttttcttgttctttcagggaattgtccatgtaacgacccaatgaagcacccagagcgtaagcagcctgctcatcgtcgtttttgaattgtgggttggtagtagctggtgctgaagccgctggtgcagctgcagtcgaatcagtcgcttttgcagcatctgctgccatggcctgagttgcgcccagggcaagagccatcgtggtagctaacagcgttactttaaacagtgatttcatccatttctccaagacttgaggctcttacctcaagtaacaatacgaaagttcgccggttaatataactgtccgtgtcaatgcatgacaatcgctatactaatcgaacgcgcctaaatgagaccttttttgcttcaataagtttctgaagtcaccacaaaacggctaactctgagttttttctgatgattgcgggtagaatatggcgcaaactctgtcattctgacagcctatccttatcaggcggcacctaagcggcattacaggcaaaaattatggaccaacataacttcgaacagcggcttgaagcgctggaaagcaaactggcttttcaggaagtgaccattgaggagctgaatcagatagtgacctcgcatcagctggaaatgagccgactgcatgaccacctgcgcctgttgactgacaggctgcgtgcttcacagccttcaatgattgccgatgcgtcggaagaaaccccgccgccgcactattgagagctaaatgaagcaataaaaaaggcgaccccggggtcgccttttttcattaatcggcctttaccgattagtggctgcagccgcaaccgccggtaccacaaccgccctgaccgtggtcatggccgtggtcgtggtcgtggtcgtgaccgtgctcaccgtgaacgtggccgtgagccagttcttcttcggttgcttcacggatagccacaacttcaacgttgaagttcaggttctgaccggccagcatgtggttaccgtcaaccacaacgtggtcgccgtcaacttcggtgatttctactggaacaggaccctgatcggtatcagccaggaaacgcatgcccacttccagctcgtctacgcccatgaacacgtctttaggaacgcgctgaaccaggttctcgtcgtagttaccataagcttcgttagcgcccacgtgcacgtcaaaacgatcgccaaccgcatggccttccagcgcgctttccagaccggaaatcagcgagccgtgaccgtgcaggtagtccagtggtgcgctaaccggtgattcgtcaaccagcacaccgtcttctgtacgtacctgatacgcaacgctgacaaccaggtcttttgatactttcatgataactcctaccgttgaaaacttgatttcgtcaaagattgtactttgcggaacactgtattttgcgaaatattgtagcggaaaaccgcgcctctgtaccgaacagcataaaaaaaggcgcgggatagcactactcgggatggaagattccaattacctgctcttcgcctcgaacgtgcttggtgacctgctcatcggtctgacgtttgtggtgcccgcacttggcacattccaccacttcgacctgatcttcctgccataacatcagtgtatccagtgctttacactcagggcataccgcaccggcgataaaacgtttacgcgttgtagccatttcttgcctctcatgaatctccaccacgagacgcccgtagccgcctcgccggatggaatcctttacaaaaaatattcggaaacttctgtcatggtacgccttgcggcgctattcgtcatcgtcccagccgtcgagctgccgacgttcattatgcatttcactttcgaagatatcttccagctcgcgacgcgcctctttcacacgggaaatttgcgccacatcgccctgcacctgcggcaccaattcacgcagcatgcgcatatccagacggcggaaatgctgctgcgcacggtaggcgctgtgaggatgcataccgagcgtaatgagcgtctttttacccagttcaagcgcactcgagaaagtttcacgcgagaagttctgaacaccggcctgcagcagctcgtgcgcctcaacgcgcccgcgcgcacgagccagaatattcagatgcgggaaatgctcctgacacagtcggacgatttccatcgtatcctgcggttcattacaggtgataacgatggacctggccttctctgcgccagcggcacgcatgagctcgagcttggtcgcatcgccgtaatacacctgataaccaaagctgcgcatcaggctcacggcgctgatatcgcgctcgagcacggtgatacgcatcttgttggccatcaacaggcgaccgacaacctgaccaaaacgcccaaagccgacgatgatcacctgcggctcgttatcctcgacgaaatgcttctcgtcactctcctcctgcgcgttatagcggcgcaccagaatccggtcgacgtatttgagcagcagcggcgtggtcatcatcgacagcgtgacaatgaccaacagcagggaaagctgtgtcgaagagataaccttcagcgccccggcggcagagaacagaacgaaggcgaattctccgccctgacttagcaccgccgcaaactgtaatcgcaccgaggtgcgcaggccaaacacccgggccaatagatagagcacaccgcccttgaccatcaccagcaagatgacgctcgccagcaccagcaaaatattggtgtaaagcacgccaagattcagcgccatgccgacagaaataaagaacaggccaagcagcagtcccttaaaaggctcgatagcgatttccagttcgtgctggtattcgctttccgccagcagtatcccggcgatgaaggtgcctagcgccatcgagaaaccaagctcctgcatgaacagcgccgcgccaagcaccgtcaacagggcggcagcggtaaacacctcgcgcacgccggaggccacaataagacgaaagatcggccgcagcagatagcgcccgccgaccagcatgccgacaaatgccagcaccttcatgccgatcatcgcccagtcattaccgccggaagaggtgcccgccagcacggggattagcgccaatgccgggataaccgcgatatcctgaaacagcagcaccgcaaaaccgagctgtccgccctcgttgcgcgtcatgcctttgtcctgcatcagctgaagcgccatcgcggtcgaggacatcgccagaccgatgccgcctatcaccgccgcctgccaggcgaagtgtgtcagatacagcaggccgcccagcaccagcgcggtgagaatgacctgaccggccccaacgccaaatatctgtcgccgcagctgccacagcttgccgggattcagctccaacccgatgataaacatcaggaacacgacaccgagctcggaaaaatgcagaatctcgtcgacgtcgcgaataaagcccaagccccaagggccgatggcaatgccggccagcaggtagcctaataccgcgccaatccccaggcgttgggctatcggcaccgcgaccacggcggcaaacaggaacagcagtatcgctgtcggtaaattagagctgtcgatagttaaacccctccatgtgggacaggagactgtagccattccgcgtaggcctcggcgtggctggccaacatttccggctgctgacgtcgcgcccagtaaataagaatcggcgtcatccagtgcatgtggcacatggcggcggttagctcaaagggccgcagaatgtcactcattttgtagcgattgtatcccccacccggtacgcgccctccggctcgccggtggtaataaccgaacgccagtacttgccgctcagcgccgtcccgcccgcaccgctggcaaagccacgggcgagtacgcggtccatccactccttgagcagtgccggacagctataggtatacagaggatgttgaaaaacaatcactttatggtcacgcagcagttgctgttcgcggtgaatatcgataaaaaaatcaggataatgggcgtacagatcgtgaacggtaacgttgtccagcttgcgtgccttgtcgagtaatacgcggttggcgaccgaatcgggtgactccgggtgagcgtaaagcagcaaaaccttaggtggctgcgacatcaatacctccaaagcgtcgtcagggtgccgtttttcagctaccatgcttcgcaaataccaaataggacgttttatacgtcttgtttaactcatgctcgtgacagttaatttaacataccctaaacagacggcgctttatgatagttttctcatcgttacaaatcaggcgtggcaccaatgtcctgcttgacaatgcatctgccactatcaatccgggtcagaaagtcggactggtaggaaaaaacggctgcggtaaatcaaccctgatttccctgttgaaaaacgaaatgagcgccgatgcgggcaacctgacgtttccgtcaaactgggcactggcctgggtaaatcaggaaactccggcactagacgttcccgcggttgagtatgttatcgacggcgatcgtgagtttcgtcagctggagtccgagctcaaagccgccaacgagcgcgacgacggccacgccatcgcgacgttgcacggtaagctcgacgccattcaggcctggaccattccggcacgtgccgccagcctgctcagcgggctcggctttacgcagaatcagctgcaacagccggtaaaatccttctccggcggctggcgtatgcgcctcaacctggcgcaggcacttatctgccgctccgacctgttgctgctcgacgaaccgaccaaccacctcgatctggacgccgttatctggctggaaaaatggctgaagagctataacggtacactggtgctaatttcccacgaccgagacttcctcgacccgatcgtcgataaaatcctgcacatcgaacagcagaccttaaacgaatacaccggtaactattcgtcgtttgaacgccagcgcgcgaccaaactcgcccagcagcagtcactgttcgaacatcagcaggaaaaggtggcacacctgcaaagctatatcgaccgcttccgcgctcaggccaccaaggccaagcaggcacagagtcgtatcaaaatgctggaacgcatggagctgattgccccggcccacgtcgacaacccttttcattttagtttcaggtcgccggaaagtctgcccgacccgctgctgcgtatggaaaaagttagcgcgggctatgacgacaacgtcatcctcgattctatcaagctcaatctggttcccggctcgcgtatcggcctgctcggccgcaatggcgcgggtaaatcgaccctgattaagctacttgcgggtaccatgccgccgcttgctggcgatattggtctggcgaaaggcgtgaagctcggctacttcgcccagcatcagctcgagttcctgcgtgccgaagactccccgttacagcatctggtgcgactggcagacaagcaaaccgaacagcagctgcgtgactacctcggcggcttcggcttccagggtgacaaagtgaccgagaagaccgagcgcttctccggcggcgagaaagcccgtctggtgctggcgctgatcgtgtggcagcgccctaacctgctgctgctcgacgaaccgactaaccaccttgacctcgacatgcgtcaagcgctgaccgaggcgctgatcgacttcgaaggcgcgatggtggtggtatcgcacgaccgccaccttctgcgctccaccaccgacgacctgtatctggtccatggcggtaaggtcgagcagttcgacggcgacctcgaagactaccagcagtggctggtcgatattcagcgtcaggaaagccagcaggatacaccggaaaaagacgccggtgccaacagtgcgcagtcacgcaaagaccaaaaacgtcgtgaagccgatttccgcaaccagactcaaccgctgcgtaaacagataaccacattggaaaaacagatggacaagctgagcagcgaactggcgagcgtcgaagagaagctggccgactcggcaatttatgacagcagccgcaaggccgacctgaccgcctgcctgcaacagcagatcaaggtgaaaggcgagctggaagaggtcgagatgacctggctcgatgcgcaggaacagcttgagcagttggcgcaggaatttaacgccggcgcttgagccttcttaatgcgggggcgcgtccgtgccccgacatctcttcaggctatgaggttacgaagccttatagaaaggtttatccccgaggatcgtcgcccgatgcatgatacgccgctgcggtaagtagtccgcattagcgtagtgctgcgtgatacggttatcccaaatcgcgatatcgttctcctgccaacgccagcgcacctggaactccggtttggtgatatggcggaacaggaactcgaggatcgccgcactctctttttcttcaagtcccacgatgcgggtggtgaatccctcattcacaaacagcgcctgccggccagacaccggatgcgtgcggataaccggatgcagcaacggcgggttcttctctttggcctccagccactgctgatgttcttccggcgttttacggtatttgtactcctggaacgacttggtgaaatcatgctcagcctgcaaaccggccagcagcttcctgaagggttcagacagcgcctcataggccgcaatgccgctggcccacagggtgtcaccgccggtagagggcagcgtcttggccgccagtatggcccccaaaggcggggtctcgataaaggtcacgtcagtgtgccagttatcgttatccggcggattgttgtcgtgagtatcgaaaataatgatttcctgcgcctccggcgtctgcggatagacagggtggatgtgcagatcaccaaaccgtgccgccagcgcacgctgctgaaccggggtgatcggctgatcgcgggcaaacaacacctgatacttgagcagcgcatgatagagctgttcaaactgtgcgtcggataatggacggctaagcgacacatcctccaccagcgcgccgatgtgcggccctagcggggtaattttgagacgttcgttcattgttgttctccgtgccagggggtcagtttgcgttgcagataacgcaaccccagttcaagcgcacaggcaatcagcgcgataacgcttatcccggcaataaccacatcagtggccagaaactctccggccgactgaaccataaaacctaatccccgcgttgccgcaataagctcggcggcgaccagcgttgaccaccccacccgagtccgatgcgaacgccggtaagaatttcaggcagcgcaccgggcagaatcacatagcgcagcacctgccaacggcttgcgcccaacgcctgcgcggcccgaatgcggacctttgaggcgctgcgaacgccggccagcgccgacatcgccaccggcgcgaaaattgccagataaatcagcagaattttcgaggtttcaccgataccaaaccaaataaccatcagcgggagatacgccagtggaggaacggggcgataaagttcgattaacgggtccaaaatgccgcgcagcgtttcattcagccccatggcaatcccgacaggtactcccaccaccaccgccgccaacagggcaataacaatgcgcgtgaggctggccgcaaggtgctgccacagcgtggcgtccatgaagccctgcggactggcaatggtaatcagctgatgcagcacctgctgcggtgcaggcagaaacagcggcgggatccacttgagcgccgtgacggcccaccagataaacaacagcgtcaccagtgtacctatgctcagacgcacgttacgcggcagcgacctgccttttgacgttttactcttctcgcgcacgagtgttttcagaacaggttctgcgctcatagcaggcctccacgatgttcaaatacctggctgagcacgtactcgcgccgttgaatgaattccggcgatgacttgatgctacggcatgattcaccgtcggcgtagcgctgtccgaagtccagcgagatgcgttccagtactctacccggccccggagagagcagcagcagttcactggcgaggaatatcgcttcctcaatgtcgtgggtaatcaggaagatttgtttgccgctatcgcgccagatcttgagcaacagctcctgcatctgttcgcgggtaaaggcgtcgagcgcgccgaagggctcgtcgagcagcagcaggcgaggatcggcagccagtgcacgggcaatgcccacgcgctgacgcataccgccggaaagctgccacagtttgtgattctcataccccgagagtccaaccttggcgagcatccgttccgccgtctgccgacgctggtgtttatcgacgccggcgagctgcaggccaaactcgacgttactttgtacgtcacgccacggcagcagcccctcgtgttggaagaccacgccgcgctccgcaccgggtgcgttaaccggcaaaccgtccaggcttatcgacccaccgctcggcgcggtaaatccggcaatcagattgagcagcgtggttttgccacagcccgacggccctagcaccaccaccagctgcccggcatctatctgcagggaaatatcatgcagtaccggattaccctgatactcggcggaaagttgagaaacctgaagcatgtctttctccttaggactgcgggctggcctgaacggccttaacaaacttgttggtcacatagctgctgtagtcggcgtctacctggtccactttgccctgttctttcaggaagctggccgtatctttgatggctttatcgaccggctgacccaattgcgtcacctgctcgctgaccggcagataacggttaccttttaccagcccggcaatttggtcatccggtaccccgctcaggcgcgacagcgtgttcagattcgaggtgtccttcagccactggtcagggttttgcagataagatttctgtgcgcccagtgcggcacgggcaaaagcggtgaccacttcaggatgcgcctgggcgaagtctttacggaccacccaaacgtcaagcgtcggcgaaccccatttgcccacctgagaggagtcggtcaacaccttgccggttttttccaactcgttcaccgccggtgcccagacataggcgccgtcgatgtctccgcgagcccaggcggcggcaatggccggtggctgtagattaacgatggtaactttcttaggatcgatgccccagtgtttcagcgcagccagcaggctgtagtgcgtcgtggagatgaacggtacggcgatgcgtttgcctatcaagtcctgtgggctgttgatgcttttcttcaccacgaaggcttcagagctgcctaactccgaggccagcaggaaggcttcgataggcagtttctggctggcggcaacggcgagcgggctggagccgatattcccgatctgcacatcgcccgaggccagcgcgcgcagtacgcttgaaccgctgtcaaatttacgccagtccaccttggcaccggattctttcgcaaaggtgttctcggcctgcgccaccttggccggttcggcggaggtctgataggccacggtgacgtctaccgcgtgtgcgctgagtgcggtcagtgacagcagcagtgctgcgccacgcaaaattgaacggtttgccatcgataaatgctccacaagagtgatgagtcgtttttattcgggtttgtagagaatttttagctgagcgcaggaagcatttaaagtaattaaaaattacctttaataaccaaaaggaatatatgggatttataacgcaggcacggtgggatacaaaagcaaaacggccaccctcgcggatgaccgttatttatcgagccgggtcgataattatcgccaaatcaacaacacgcaggcggcagtgagcagccccatggcgatgttgaaggtgtaccacgctcggcggctgtgcagcagtcgaccgatcacggtgccgaaacccagccagataatgcctgaaaccagattgaccaggaacatacccaagctgatagccgcaatagagtggttgtaggccgctccggcgaggctgaagctggcaaccgccccgagtcccatcagccaggccttgggattcaggaactgaagcagccatccctgatacagacgaataggcttgggtggcggggcgtcagtttcgagtgtctcataggctgaggtgccaatcttccacgccagccacagcagataaaggctaccgagaacctttaataccgtgtgcagggtaggataaatcaggattaacccgccaacgccgaaggcaaccagcagcagaatgctctgcatgcccaacatgatgcctatcatcagcaggagtgaacgcataaaaccaaagttcgcacccgaggtcgttaacaacatattatttgggccgggcgtaattgccgctacccataaaaatccaagcatcgaaagaaataaactaagttccatttaacaggtgctcctcacctccaactattgtgcgattagcagtgaagctatcagtgtgctattggtagtacaagcttactgaacaggatttttttcagaaaatatggctcatcattttcttcccctgcgcggcgctagcaatccgcacttgcaaaccttgctgccgcgtttgttcaggcggcgcgtcaaactcaaaccggtgtggcaacggctcgatttacccgacggcgactttatcgatttggcctggagtgaagacccgcagtttgcccgccacaagccgcgtatggtgctgtttcacgggcttgaaggcggctttagcagcccctatgcccacgggctgttagcggcgtggaaaaacaaaggcggcctcggtgtggtgatgcattttcgcggctgtagcggagaacctaatcgacttaagcgcatctatcattccggtgaaacggaagacgcccgcttcttccttaactggttgagcgagacctacggtgatgccccaaccgccgccgtcggtttttcgctgggcggcaatatgctggcctgttatcttggcgaggagggcgagaactgccgtttacaggcggcggtcatcgtctctgcgccactgatgctcgaaccctgcgcctatcgcctcgagaaaggctcgtcacgcttttatcagcgctacctgctggaccagctcaaggctaacgcccgacgcaagctgattaaatatccgggcacgctgccggtgacgctcgagcaactaaaatcgatgcggcgtatccgcgagttcgacgacgccattacctcgcgcgcccacggtttccaaaacgcgctagactattatcgacgctgtagcggaatgccgcggctgccgagggtcaaagtgccgctgctgatcattcacgcgaaggacgacccgttcatgacggatgcggtgattccgaacgcacaggatctgccgcctggggtagaatatcagctcaccgaacacggcggtcacgtcggtttcgttaccggcagttggctgaatccagtaatgtggctggaaaaacgcattcccgactggatagcgccgcggctgatccccgaatcacagactgagaaaagataaacctaagatgatgatcccctggaaagagttagccccggaaacgctggatagcgtaattgaaggttttgtactgcgcgaaggcaccgactatggcgaacaagagcgtacgcttgagcaaaaagtggaagacgtacgccgtcagctaaaaagcggcgacgtggtgctggtatggtctgaactgcatgaaacgctgaatattatgccacgcggacagtttcgcgccggtgacgtataaattagcgaatagatatggtaacaataagcttaattatgcgtattaggcttccccaatagattcctggtgcagatgcgttgactgcaatttgaaagatgaagggattaccatgtcagctaaacaccctgttattgccgtaactggctcaagcggcgccggaaccacaaccaccagcgtcgcttttcgaaagatttttcaacagcttggcctgcacgctgccgctcttgaaggcgacagctttcatcatttcacacgccctgaaatggacgctgccatccgtaaggcgcgcgacctgggccgacacattagctactttggccccgaagccaacgacttcacgctgcttgagcagagcttcattgaatacggtaaaaccggtaccggccgttcgcgcaaatatctgcatacttatgatgaagcggtgccttataaccaggtgcccggcactttcactccctggcaggcgctgcccgagccaaccgacatcctgttctacgagggcctgcacggcggcgtagtcactcatcaggttgatgtcgcgaaacacgttgatctgctggtcggcgtggtgcctatcgtcaaccttgagtggatccagaaactggtgcgcgacaccggcgagcgcgggcattcgcgcgaggcggttatggactcagtggtcagatcgatggacgactacatcaattacattacgccgcagttttcccgaacccatatcaacttccagcgcgtgccgaccatcgacacctcgaacccctttgccgcgaaagccattccgtcactcgacgagagcttcgtggtgattcatttccagggctggaccagattgactacccgtatctgctggcgatgctgcaaggctcctttatctcgcacattaatacgctggtggttcccggcggcaagatggggctggccatggagctgattatgggaccgctggtgcagcggctgatggaaggcaagaaaatcgaataggcagacggcgggagaaccgtctgccgttaaacccacggtggtttactcggcgatcagcaggtcacgaataaacccgacgtgcagctgaacgccgatcgccagcgcgtcttcatccagcttgaagcgcggatggtgcacaccgtgggtagcgccaatactttcattaccgctgccgataaacaggaagcagcccgggattttctcctgataagacgagaagtcctcgctgccgtaaataggctctgacagctcaatcaattcctctgctcccctttcacgcgccaccacgcgacgcgcaatcgcacaagcatcggcatggttgttgccaatcgcatagccgcgagtccatttcacctcagcctgagcaccgtgcgcctgagcaatgcccatcaccgtctgctcgaccagctgcggaacccgctcgcggacttcggcattgtgggtacgcagcgtacccgccaaccttgccgtatcagggataacgttatacacctcaccggcctggaagacggcaacggtcagtaccggggcatgctgcggattaagcttgcgcgccacaatctgctgcattgctgtaaccacttccgcaccgacggtcacaggatcaatacacatgtgtggcattgagccatgaccccgcgccccttgaggatgatgtcaaaattatcgctcgaaccgctgaacacgccctctttcagaatcaccttgccggtggcgaagttaggcagaacatgcaggccgaaaatcatactcacaccgtcgagcacgcccagtttgaccagctcctgagcgccgcccggaggcgcttcttccgcatgttggaagataaatcgcacgcgacctttgagcgaggatttgcactgcgccagaaccttagccgcgcccaacagcatggccgcgtgagcgtcatgaccgcacgcatgcataacgccgggattggttgaacggaacggctcgtcgctctcctcctgaataggcagtgcgtcgatgtctgcacgcagcgcgtaaattggacccaacctgtcgccagtcagctcggcaatgacgctgtttggcgtcaggcgtgtcaaagtcaggccggggatcgccgacagctgctcggcaatatagtcggcggttttcgcctcctggaaggacagctcaggattggcgtgaatatgtcgacgccagcgcaccacatctgcgttaacttcactcactaatgcttcaaaattaatcgtcattattggcttcctcaaaatgggggcagttcactaggctgcatcacgcgcagcaaaacgagatttagacagcaaaggcaacatcagcaggcccgagacccacatcaccagcgtcagaaaaataaaggtcgagtcatagccctgggtcagggtaatcagatagcccatcgcgatgggcgcgacgaatccccccaacgtcccccggtgttaagcagcccaatcgccccgcccataacctcggtcggcaggcgtttcatcggcagggtaaaggtggtaacaaaggacgacatcatgaaaatgttgccgaagaacaagaacaggcaaacggtgtaaaccgaattcgaggtgtagaccagccagatacagacaccgctcagcagcgagctgtacaagatgaccttcggctcgcggccctgcatgaatttccccaccagccagcctgtcgagagcgaggagatccagatacctaatcccctaccgcaacgactatccccgcgacgtcgagcgaaaaaccacgctgctgcaccagatatttcggcaaccaggccatgagcccgtaggtcgggatattgatgcaaaaattaacggcgaacagcaccagcacaataggatttttaagcaacgcgagatagctccctgtcttgttggcggccgaagttgccgaatcacgcggcggcgaaggtacccaaaacaggatgaaagcggccaccacgaaggccagcaggcccaaggtcgagaacgatccgcgccagccgacgtgcgccagacagtacacggccaccagcggaccgaccgtcatcgccagtccggcagaagacaagagaatcgattgcgcgaaagtacgctgttcgacgttgaagttagcaacaaccgacttggcgcacgagctgggataacccgaatgcccgataccggccagaaaacggaaggtgatcagcagacccagaccaaaacccaacagcccgaagcacagcgcaaagccgcccaacagcgtcagtgaacaggccaggacttttttatagccgaagcggtcgttgagccaaccggcggggatctgaaacagcgaataggccagaaaaaacatgccggtgatatagcccagttgctgaggggctaaatcgaactcgcgacctatcggcaacagcgcaaaaccaatcacggttttatcgatgtagaccagaacataacccaaaaacagtaagaaaatcattaaagaacgattttgcataactgatatcctcgaatgttatatcccagcagccacccctgacctgagaaaaagataacgcgctgaattgtttatttttatatgccagttaacagtcagttaccgacttcttaaaaacctagcagctttacttcagagccataagatgcaattttttgaggggtgatgctttttactgatagggtctgagatgaaatatttgcccaagctgcaacagctaaaggtttttcagcaagttatccgcagcggcagcattcgcggggcggcgcgtgcgatgaatcagtcacagcctgccgtcagcagaacgctgcgcgagcttgaacaaatcctcgatactcagctgatcgttcgcggcacgcagggtatgacgctcaccgagaccggccgcgccttctcgcagcgaatgcagtttattctcgaagaactgcagcgcgccgccgacgaaatacagcaaatcaaccaattctcgcagggatcggtggcggtcggcttctcgtcgctgctggcgctgaccatttttcccgcgctggccactgagttcacggcgcaatatccgcaggcaaaattgcatatcaaggagtcacagctctcgaccctgctgccttcattgcgtgagggaaggttagatttcgccatcggcacgctgggcgtcggactccccattgaagacatggtgtgcgagcccttgttcagtgcgccgttctgcgtcgtcgcccgcaggcagcatccgctggcgcaggccacgtcgttaagcgaattgagagaggcaagctggctgcttcccgagacggacatgggttattaccagcagcttgctgccctgctggaggaaaacggctgccacgcggtgaaatcgcctatccgtaccgactcattgattagcgggctgatgatgatgctgaacggggattatctgtcggtggtcggcaacgccatggcgacgccgttcttcatggaagacaagctttgccgcctgcctgtcgacagcctgccggcggcgcaatactgcctggtttactcacaaaaaacgccgctaaccttaacggcgcggcgtttcttagacctgctgcggctgcactgtcagcgttacccttggtaacgtgccgcacagcactcaagcttattctattgaatcaataacttcaaagctgtgggtgatcgtcgctgccttgcccagcatcagcgaaaccgagcaatatttttcggcagacagcgttacagcacgctcaaccactttatccgtcagacccttgccggtcacgatgaagtgcaggttaatggtggtaaacaggcgcggcgcttcttcgcggcgttcggaggtcagcttgacctcacaaccgacgacgtcgttgcggcctttttgcagaatggacaccacgtcgatggcgctgcatccacccgctgacatcagcagcatctccatcgggctcggtgatttgtcgcccgcattgccgtccatcagaatttgatggccagaagaagactcaccgagaaacgttaatccctcgacccattttacacgtgcttgcatttgcctttctccggtaataattttcaaaacagactacccttaacccctgaaactggcaatggaactcgatccgcatcatgctgaagcgagacaacacaagacacgtcaccaaagctgtgctacaaacaaggcgaaagaaactttccaacaagttgcggccggggtttttgggtttaacaggataaccttggtgattatggcaaattactgcctaattcacgcctcaagccgcttgcagcattgctggtcagttcatatgctaaaagagcgcgaagtaaaaaatcgccgaacagggattttgagccctgtgattttgggcagcgataaaaagaggataataactaatggttctcggcaagccacaaacagaccctactctcgaatggttcctgtctcattgtcatatacacaagtacccctctaaaagtacgctgattcaccaaggtgaaaaagccgaaacgctttactacatcgtgaaaggctcggttgccgtgctgattaaagatgaagaaggcaaagagatgatactttcctaccttaaccaaggtgacttcatcggtgagctgggactcttcgaagaaggtcaggaacgtagtgcgtgggtaagagcaaaaactgcctgtgaagtcgctgagatttcctacaagaagtttcgtcagctgatccaggttaacccggatatcctgatgcgcctgtctgcacagatggcgagtcgactccagattacctcggagaaagtcggtaacctggctttcctcgacgtaaccggacgcattgcgcaaactctgctgaatctggccaagcaaccagacgccatgacccatccagatggcatgcagatcaagatcacccgtcaggaaattggccagatcgtcggttgttcacgcgagactgtcggtcgaattcttaaaatgcttgaagatcagagcctgatctcggcacacggtaaaacgattgtcgtttacggcacccgttaatccccttaaaaacggcgcagcagtcttctggtgcgccgtttttattcgtcacgttacacaaaattaatgacgctttggcgacgaatcttctaccaccccgaggttaactacgcgctgcgacagacgctggtcctctgcctgcctattggttttgccatgctgtttggtcagctgaagctcgggatgctgtttgcgctggtccccgcctgctgcaatatctccggtctcgatacgccgcataagcgcttcttcaaacgtctggttatcggcggttcgctgtttgccttgagcagtattcttctccagctgatgctgattaactggcatgttccgctgccgctcatcatgcttggcctgacgctggtactgggcgtcacgggtgaaatcagcccgctgcacggccgcctgctgcccggcgcgctggtcgccagcatctttaccctcagtatggccggtgtggtgcccatctggcacgctccgctgctgtttgtcgtaggtaccgcctggtatgggctgttcaactggttttggtttcggctctccgaagagcagccgatgcgcgagacgctgagccagctctacgtcgaactcgccgattatttcgaagcaaaatacagcctgctcacccagcacaccgaccccgaaaccgcgctgccgccgctgttgaaacgacaacagcaggtcattgacctgattgccaccctctatcagcagctgcacatgctgccgacgggcaatcatcagcatcataaaaggctgctgcgcagttttcaggtggcgctcgacctgcaggagcacatcaccgtaagcctgcacctgcccgcagaagtgcaaaagctggttgaggaaagccacgccgaggcggttatccgccgcaatgcgcaggtcattgccgcacggctgcgcgttatcgcgagcgacatcctctaccatcggcgctcggagcggttcacaatggccaacgagctggccgcgctggaaaaaatagcctctcgctatcgtgacaatcccgtcgggcagttttgctactaccatttcagccgcatcgcccgactgctgcgcacccagcgtccgctgtatcgccgcgacctgatgcaaacgcagcatcgtctgcccttctggcccgcgctgaaaggctatctttccgtcaagtccgccgccctgcgcaatgccgcacggctcggcgtaattttggcgcttggcagcagcctcggcatgttctttaatctgcctaaaccttattggatcctgctgactaccctgctggtcagccagaacggctataacgccacccgcgtgcgtattcagcaccgtgcgttgggcacgctggcgggccttatcgccgcagccgggttgcttcagctcgcgctgccgcaaaatctcacgctgtttttcatgctgatgattacgctgatttcctacaccgtactgcgaaaaaactacggactgggaatgattggcctcacggtaaccgccgtctataccttgcaaatactggggctaagcggggccaactttctgctgccgaggctgctggacacgctaattggctgtgcgctggcgtttggcggcactatctggctatggccgcagtggcaaagtggtttgctgcgcaccaatgcctatcaggcgctggaggcagaccagcaggctatccggctggtattgcacgaggatcctgacccggccgaactggcctatgcgcgcatgaaggtcaatcaggcgcacaatcaactgtttacctcgttgaatcaggcaatgcaggaacccggctttaattcgcactatctgaccgatatgcggctgtgggtcacgcacagtcagtttctggtagaccacattaatggcatgacaattctggcgcgcgagcactatatgctgacgcccaaactggcgatggagtatttgcagacctgcgagattgcgttgcaaagttgccagcagcgcctgacctatgacgggccgagcagtgagaaatcgcttttcaatgccccagatcagcatcctgacatgccgattaccgaaatggagcgtcatttgcgccgtatgctggcacaccttagcgccatgcacaccatctcgtcccttgcctggaagcaaaggccacatcacggaatttggttaacgcgaagagtgaaggagtgatcctttcctccggtagaggaggaaaggagagtattgattagccgacgattttcttaaccgctttttcgaagcgcgccatgccttcgctgatgtcggcgaagtcgataaccaatgacggtgcgaaacgcagcacgttggtccccgccaccagcatcatcaggccaaactctgccgaagccgtcaggaattctcccgcacggtttttgtatttatccgccagttcggcaccgatcagcaggccctgaccacggaactcgctgaagacgtggtatttggcgttaatcgcttccagcgcctggataaaggcgttgcggcgctcttcaataccagccagcacttcaggggtgttaatcacgtccagcgcagcttcagcaacggcgcaggccagcgggttaccgccgtaggtggtaccgtgtttgcccggtgccatcaccgaggccacttcttcggtggtgatcatcgcactcaccgggaagccgccgcccagtgccttagcggtggtcagaatgtctggagtgacgccgtagtgcatgtagctgaacagcttgccgctacggcccatgccgctctgtacctcatcgaacaccagcagtgccttgttggcatcgcacagctcgcgtagcccctgcaggaacgcctgcgtggctggcgtgacgccgccctcaccctgaatcggctccaccacgatggcacaggtgtgatcgtcgataacagccttcaccgcatccagatcgttgaacggcacgtggacgatatcggcaggtttagggccgaaaccgtcggaatatttaggctgtccccaacggatacggtaaacagcgtgcggccatggaacccgttatggaaggcgatgattttgcttttatacgggctgtgcttggcagaagagtagtagcgcgccagcttgaatgccgcttcattggcttctgcgccggagttggcaaagaacacgcgatcggcaaaagtagcgtcaatcagcttctgcgccagacgcagcgcaggctcattggtgaagacgttgctcacgtgccagagcgtttcgccctgcttgtgcagcgcctcaaccagcgcaggatggcaatggcccagcgcagtgaccgcgatacccccggcgaaatcgacatactcggtaccctgctggtcccatacgcgactgcctttacctttgactggaataaacttggctggtgaataaaccggcaaaataacccgatcaaatgcatcacgccctaccgctgctttttctgtcattgccctactctcctttgcgctgccgctactgtcaggggatcacactcgaaatgaatgtgaaaatataatcacaaaatatgcataaaaaatcactcacaggcaaacgttaatcgcggttctgctgtaagtaatttttaatgctctaaattttaaggaaattatcgagcagctgatgaccttgttcgctgagaatgctttcaggatggaactgcacgccatgcagcggcaattcacaatgcgcgatgcccataatctcgtccgggcacgcggcgctgccggtccaggcagtcagtgaaaaacacgcgggcaaggtgtctggtttcaccaccagcgaatgataacgggtgaccgtcaaaggatgattcaggccagcaaagactcccgtgccggtatgctcaatcagcgaggtctttccgtgcatcacctgacgagcgcgcacgacttgagctccgaagctctgcgccatcgcctgatgtccaagacaaacgcccaaaatcggcattgagtcggcaaaatgagcgatggcgctcagcgagatgcctgcctcgtttggcgtgcaggggccgggtgagataaccagatgcgaagggttaagccgagtgatgtcgccaagctgcagttcatcgttacgctttaccagcacttcggcaccgagctcgcagaaatactggtaaaggttataagtgaaggagtcatagttatcgataatcagcagcatggttttccggcttaaagaagtcttgagattttgcctggccattctacctatttttcggcgacggcccgcagatttttcctgccgggctcgactgcgtttaggcgtcgctgatcagtgttttaaaaacattagataacggctgctcatcgccaaaggcagcggctttgttggcctcaatccacgcctcatggctgaccttgttccattgaatgtcatagcctgcgtgggtcagcagctgttcgaagaaaatgcgctgcgcgcgcccgctgccgtagcggaaaggatggagcaaattgatttcggaataatagtgcgccagccgttgatagagttcatcatcgggcaggccacgcagatactcttcgttttccagcgcctgcatcaggttattgccttcccgctcgatataggcgaaatgacaaaacggcgtatcatccttaaggatatctacctcacgcagctttcccgcccagtcaaacaagtcctgaaacaaggtgtagtgaatggcgcacagatgcggcagccccatattaggttgcccaagctcgatagtggcggcccgcagtggggtcaactccagctctgcctgatgcagccgatgagattcacggatttcgagacggttcttcagcacgttgaggccagggtaaagataagggtctgcccctgaaatcactttatcgctcataatgcctcctcaacgcagcaagccgttcaaggacttgctcatcagtcagctcgacaagtttcgtgtcgagaccatccagcgccgcgctgctttgaaaattgaggttcctgcgcttgcgatagaattgctctttctgcttgtccgtcatttttgtcgccatacctgctcctccgttgactgaacacagtggatgttaagtatagacgtcgagaatgatttttgagccggcggccgccgcgatgcagagggcaatatcccgcgggacggcgagcaggttaagagccaggcctgttgattagcgctttctgctgccggtaatggaccccagcacgccgcgtaaaatttcgcggcccaggtcgcgtgccatgctcttggcggcagtctgcacaatgccgtcgtgcttaccgccgcgcggaccggttgttccaaacaacagttcgttaagtccagccatcaacccgccaccggccgatttctcgccctgcggatggggggtctcaacttcgcccgcggctttaccgacggtgttaaacccctgcacggaaagtttctcataggccgattcgcggtctatcgcatcttcatagcgtccgtaaagcggcgactgattgatggccttgttcaggccttcagcgcccagcggccccatctttgactcgggagcaatcaccatcgcgcgttcgactatctcggggcgtcctttctcatcgaggaaggagaccagcgcttcgccgacgccaagttcggtgatggcggtttcaacgttaaattcaggattcgcacgcagcgtctgcgccgcagcacggaccgctttctggtcccgtggcgtaaaggcgcgcagcgcgtgttgaacgcggttgcccaactggcccagcaccgaatccgggatatccagcgggttttgcgtcacgaaatagatgcctacccccttggagcggataagcctgaccacctgttcaatcttggtcagcagcgccgccggcgcgtcgttaaacagcaagtgggcttcgtcaaagaaaaacaccagctttggctgctcgagatcgcccacctcgggcagatgctcgaacagttctgccagcagccacagcaggaacaccgaatagagtttgggctgattaataagcttgtccgccgccagcaggttgataatcccctgtccgttggcgtcggttttcattaagtcgttgatgtcgagcatcggctcgccgaagaacgggttcgcgccctgcccctcgagcgccagcagcccacgctgaatagcgccgatcgaagcgggtgagatattgccatactgggtctggaactgcttcgcgttatcgccgacaaactgcagcatggcgcgcaggtctttcatgtcgagcagcagcaggccattgtcgtcggcaatcttgaacactaattgcagcacgccgttttgaacatcgttgagactgagcagacgccccaacagcagtgggcccaggtcggaaagcgtggcgcggatcgggtgacccttttcgccgaagatatcccacggaataagggtgcaggcggtgggttgccagtcggtgacgtcaatcgccgccagacgggcattcagtttctcggaggcaaccccctcggtccccatccccgataggtccctttcacatcagccaggaataccggcacaccaatgcgagaaaactgttcggccattttttgtagcgtgaccgtcttaccggtgcccgttgcaccggtaatcaggccgtggcggttagccagtgcaggaagaatagtcaggttctgagccggttttccggcgcgcattgcttttgcaatcacacggggttcactcatcttttctccttgcacggctgccccagagacgacgagcagcctgaatcaggctattttcagcgcttggcgaccgttatggcacaaccttagctgaaaggataacgatcggggtgcttggcacgttctggtaaggtcccacattatcggttttcaccgaagagatcttgtctacaacgtccatacctttgataactttaccgaatacagcatagccgaaatcagtctggccgtgatccaggaaggcgttatcggcaacgttcaggaagaactgactggtggcgctattaggatccgaggtgcgggccattgaaatcgtgccgcgcagattgcgcagtccgttgtccgcctcatttttgatcggcgcattagtgcttttctgctgcatgttggcggtaaaacctccgccctgaatcatgaagccagggatcacgcgatggaaaatggtgttgttgtagaaaccactctgcacgtaatcaacaaaattcttaacggaaaccggtgccttcgcgttatcgagttccagttcgatattacccgccgacgtggtcagcatgacgtgggtatccgcagacttggctgcgaatgccgcaggggccatcgcagtgagggaaagcaaagctgtgaaggtcactaaagtacgtttaaacatgacggttcctttctccaataggcaagccacaaaacgcattgattctaaagagcctaaccccgtagcgccagccctttaccgttatttacgcaatatgcgcgatcgccgcgctgtggcgtttatccctaaaatcaacgagtgaaatcaacgggttcactcttctccagatgaatgaccgattcggccggttgggtctcggcaataatgcggccatgacgtacagaatagcgcaccggcacctgacgtcgaatcgcatcaaatccactgtcggcaggcagaataatcagattagcggcgtgaccgctcttgatgccgtagtcctgcaaattcagggttctggcgctgtaggtggtgatcagcttgaggccatcgttaatctgttcatagcccatcaactgacacacgtgcagccccatttgcagtacctgaagcatattgccggtgcccatcggataccatgggtcaaacacgtcatcgtgaccaaagcagacgttaatccccgcttccagcatctctttcactcgggtaatgccccggcgttttggataggtgtcgaaacgaccctgcagatgaatattcaccagcggattggcaacaaagttgatgcccgagagcttgagcaggcgaaatagccgcgaggtataggcgccgttgtaggagtgcatggccgtcgtatggctcgccgtcacccgcgcacccatgccttcacgatgcgccagcgccgcaaccgtttcaacgaaacgcgattgttcatcgtcgatttcgtcacagtgaacatcaatcagccggtggtattttttcgccagcgcgaaggttttatgcagcgactcgacgccgtattcgcgggtaaattcaaaatgcggaatagcaccgaccacgtccgccccagtttcagcgcctcctcgagcagcgcctcaccgttcggataggacataatgccttcctgtgggaaggcgacaatctgcaaatcgatccagggtgcgacctcttgcctgacctcaagcatcgcctttagcgcggtcagggtcgggtccgagacatcaacgtgggtacgcacgtgctgaataccgttggcaatttgccatttcagggtgatccaggcgcgctgtttaacgtcttcgtgggtcagcagcgccttgcgctccgcccaacgctcaatccctcgaacagcgtgccggagatattccatgagggctcaccggccgtctgcgtggtatcaaggtggatgtgtggctcaataaacggcggcagcgccaacccgccctgtgcatcgagcacctcgtcgccctgttcctcattctgcggctgagccgtaatctggcgaatttttccctgttcgatatcaatctgccacagcccttcacaatcaggcatgcgtacattttttatggcccgcaggttgctttgcgtcacctttacctctctatttgcatcaattttttttagcttacttcaaacaatagccgatgccgccgctggcggggaaaaagcgacaattatcgtatgttaaataaacaatcgttttcatctactccctcgtgggtagaaaacgaggacggttgacttgcatcaaaaccttaccttcgcaggggattatgttacgcgcaatgaaatcaattttgaggtaaaaatgcgcaacgtcagactcgcgataattggcaacggcatggtaggccaccgctgtattgaagatattataaataaagcagagccgggccagttcgacatcaccgttttctgtgaagagcctcgcgtagcctacgatcgcgtgcatctctcctcctattttttacaccacagcgccgaacagctctcactggtcgaagaaaattactatgccgagcacaacgtcaatgtacgggtcggtgaacgtgccgtcacgctgaaccgcgaggagaaattcatcctctcaagcagcggacaacgcattgattacgacaagcttatcctcgcaacaggctcttatccctgggtgcctgccattgtcggatccgacggcgaagactgctttgtgtaccgcacgctggaagatttagacgccatagcgcgctgcgcaaaacgcagtaaacgcggtgcagtcgtcggtggcggcctgctgggtttagaggcagccggagccttgatgaacctcggggttgagacccacgtggtggaatttgcgccgggactgatgtgcgaacagctcgacgcgatgggcggcaaccagctgcgtcagaaaatcgagagcatgggcgttcaggttcacaccgccaaaaatacgcaggaaattatccagcagggcgaaacagcccgcaaaaccatgaagtttgccgacggcagcgcgctcgaggtggattttatcgtcttctcgaccggtattcgcccgcaggacgcgctggcccgccagtctggtctgacgctcgcgccacgcggcggtatcgcgattaacgatcagtgtcagaccagcgatgccgacatttatgccgtcggggaatgtgctgcctggaaccagcgcgtcttcgggctggttgcgcccggttacaagatggcgcaggtcgctgtcgaccatctgctgggtcgcgataatgccttcaccggcgccgacatgagcgccaagctcaagctgatgggcgtggatgtggccggtatcggcgacgcgcacgctcgcactctcggtgctcgcagctatgtttatctcaacgaacaggcatcgttgtataaacgcctggtagtgagtgaagacaaccgcacgctgctcggcgcggttttggtcggtgataccagcgattacggcaacctgttgcaactgatgttgaaccaactgccgcttccggaaaacccagagagcctgatcctcccggccacggacggcaatgccagcaccgcactcggcaccgatgccctccccgagagcgcacaaatctgctcctgctttgacgtcaccaaaggcgacatcatcgccgccgtgcaggctggctgccagactctttccgccgtgaaagcccagaccaaggccggaacaggctgcggtggctgtattcccctggtaacacaggtgctgaacgccgaacttgcccagcagggcgtcgaggtaaatcaccatctctgtgaacactttgcctactcccgccaggaactctaccatctgattcgtgtagaaaatattcgcagctttgagcagctattgatgaaatatgggcagggttacggctgtgaagtctgtaaacctacggtcggttcgctgctcgcctcctgctggaatgattacgtcctcagccctcagcatgccccgcttcaggataccaatgacctgttcctcgccaatatgcaaaaagacggcacttattcggttatcccgcgttcgccgggcggcgaaatcaccccgctgggtctgaaggctatcggcgatattgccgaagaatatcgtctgtataccaaaatcaccggttcgcagaggataggcatgtttggcgcccagaaggacgacctcccggccatttgggcgaaactgatcgccgccggttttgaaaccgggcaggcctacgcaaaagcactacggatggcgaaaacctgcgtcggcagcgcctggtgccgtttcggagtaggcgacagcctaggattcggcattgcactcgaaaatcgctacaagggcatccgcacaccgcacaagatgaagtttggcgtctcaggctgtacgcgcgaatgcgccgaagcgcaggggaaagacgtcggcattattgccaccgaaaagggctggaatctttacgtctgcggcaacggcggcatgaaacctcgccacgcggatctcctggcgtccgacctggatgacgacaccctgctgcgctacctcgaccgattcatggtgttttatatccgcaccgccgacaaactccagcgcacctcggtctggatggacaacctgcaaggcggcatcgactacctgcgcagggtcatcatcgacgacagcctggggctcgctgagcagctcgaagccgagcttgcgcgcctgcacgaactcagcggctgtgagtggcagcagacgctgcaagacccggcagcgcagcgacgcttccgacactttatcaacagcgacaaacgcgacgctcaggtgcagtttgttgccgaacgcgaccagcatcggcctgctcgaccagaagaacgtatcccggtgacacaggtcgtaaccggggaggacatcctatgaaaaactggcaaacgctttgcgcactcgaagatatcacgcccggctgcggcgtctgtgcacaggccggagaatggcagattgcgctgtttcgccccgatgtacagagcaccgtctttgctttgaacaatatcgaccccttcgcgcaggccagcgttctgtctcgtggaataataggcgaacatcagggtgaactgtgggtcgccagcccgctgaaaaagcaacattttcgtctcagagacgggctgtgcatggaggatgaggccttcaacatcgagagttttgaggtccagataagcggcggcaacgtgcaggttaatcttgcgcgttaattgctgatactatcgaggtttgtggggtttatcaggcctcgttggccgttgttgtcagaaagtgagtgagtcatggattatttcccgttgttttgtcagctcaagggacgcgcctgcctgctggtcggcgccggtgatgtcgccgaacgcaaggcgcggctgttactggacgccggtgcggcgctcaccgtcgttgcgctagattttaccgacgcgtttgaacgctgggccgagagcggtcaactacagaagatcgagggagaattcgcggccagccagctcgatgacaagtggctggtcattgccgccaccgactccgatacgctgaatatgcaggtcagcgaggcggccgaggcgcgaaggatattctgcaatctcgtcgatgctcctgagcaggccagttttatcatgccgtcgattattgaccgctcaccgctgatgattgccgtctcttccggcggcaatgcgccggtgctggctcggctgatgcgcgaacgcctcgaggcgacgctgccgctgcatctcggtcgactggcggagttggccggaagtttgcgccaacgggtaaaacagcactacagcgacggcatgacgcgtcgccgctggtgggaaaagctgtttaaccaccaacgtttagcgcagtctttggccaataacgacatcccgcaaagcgaggcctttattgagcagctcttcgcccagccgatagaggaacagggcgaagtggtgctggtcggtgcaggaccgggtgacgccagcctgctgacgctaaaagcgttacagcagatgcagttggccgacgtggtggtctatgacaggctggtctccgatgaggtgttaaatctggtgcgccgcgacgccgaacgtatttttgtcggtaaaaaggcaggcaaccactgcgtgccgcaggagcagatcaatcagattctggttgagcaggcgcagcgcggtaaaagagtggtgcgtctgaaaggcggtgacccgtttatttttgggcgcggtggcgaagagctagaagtgttggccgaggccggtatcggtttctccgtggtgcccgggattaccgcagcctcaggatgctcggcctacagcggcattccccttacccatcgcgatcacgcgcagagcctgcggttgattaccggccacgccaaaaaagacggcagtcttgactggccttgtctggcacagggtaagcaaacgctggtgttttatatgggactctcgcaggcgggggagatacagcatcagctaacccatcacggactcgccgttgatacgccggtcgcgctgatagaaaacggcaccacgccggcacagaaggtggtcacgggagaactgtcgcagctgagtgaactcgcaacgcaggttaaaagcccaagcctgattatcgtcggcggcgtagtcgcgctgagagaaaagctgaactggttttcaagcgccgaagcaaatccacagcctttggcgctgtaataaggcggcaaggcggcaaacccccaggaactgacaagagtcagtgactggggtgcgcggacgcagccaacgcagtgacagcgtcaagtacgaaaatccgaagttattggcgctgtaataaggcggcaaggctgcaaatcccagtcactgacaagagtcagtgactggggtgcgcggacgcagccaacgcagtgacagcgtcaagtacgaaaatccgaagttattggcgctgtaacaaggcggcaaggcggcaaatccccaggaactgacaagagtcagtgactggggtgcgcggacgcagccaacgcagtgacagcgtcaagaacgaaggattttatagtgcggggacgaagccgattgcctcatagaccttctttaaagtctcttgagcgcgagcacgcgccttctcggcaccttcacgcagaacctgctgcaggaaggcttcatcagcacgatactggtggaaacgctcttgcagaccgcccaacatctcggatactgcttcagcaaccgcacctttcaaatgcccgtacatctggccttcaaattctgcttccagctcggcaatgctcttgccgttcacgcccgacaggatatccagcaggtttgaaacccctggcttagcggcctgatcgtaacgaatgaccggcggctcttcagagtcggtcatcgcgcgtttgatcttcttagtcactgacttggtgtcttccagcaggccaatcacgttattgcggttgtcgtccgacttggacatcttcttggtcggatcctgcaaagacatcacgcgagcacccgatttaggaatcaacggctcaggaacggtaaagatatcgccataaattgcgttgaaacgacccgcgatgtcacggctcagctccaggtgctgcttctgatcttcgccaaccggtacctggttagtctggtacagcaggatgtcggcggccatcagcaccggatagtcaaacagaccggcgttgatgttctcggcatagcgcgcagatttgtctttaaactgcgtcatacgactcagctcaccgaaataggtgtagcagttgagcgcccagccaagctgggagtgctcaggcacgtgtgactgaacgaaaatggtgctcttcttaggatcgataccgcaggcgaggtacagcgccagcgtatccagcgtggctttacgtaattgagcaggatcctgacgagcagtaattgcatgcaggtcaacgatgcagtaaatgcaatcaaagtcatcttgcattttaacccattgacgcagagcacccatgtagttaccaatgctcaattcaccagagggttgtgcgccactaaagacgatgggtttactcattttttaagcttcctgatcctttaaagagggtagcccgaaggtgggcaaaaggtcggcaaagcgttcaagcacccggtcgggtttacttaaggcgatggcttcaccgtaattataaccgtaggtcatacccacacactgacagcccgcagcctgcgccgcctgaatgtcattgcgtgaatcacccacaaataccaactcgctggcgcgcaggcccatgttggccagcatcaggtacaggggcgcggggtggggttttttctgcaccacgtcgtcaccacccaatacctgcgagaacaggccatcgaggcccagagataccagtaagggcgcaacaaacggcgttggcttgttggttatcaggcccagaggtagccccgctgcggcgagcgcaacgagcgtttccttgacctgaggatagaggcgactgccaccggcggcggtttgcgcatagtggtggtcgaattggtcacgaaccttgaggcaaaactcggggctgaggtctcccttggcccagcgaacggcacgctcgaccataatgtcggcaccgttgccaatccaggtgctaacacgctcgacgcccgcctttggcaggccaacgtcagccagcgctctgtctaccgcctcggccaaacccggtgcgctgtcaaccagcgtaccgtcaaggtcaaaggcaacgccaagcggagcaagaggctcagtcattggaaaccttggccagttctttgcgcatgttgtctatcacgccgcgatagtccgggctgccaaaaatcgctgaaccggcgacgaacatgtccgcacctgcagcagcaatctcgccaatgttttcaactttgacgccgccgtctatctcgaggcgaatatcgtaaccgctttcatcgatgcgctggcgcacctggcgcagtttatcgagcgtggccggaataaacgtttgaccgccaaagcccgggttgatagacatcagcaggataacgtcgagtttatccatcacgtagtcgagatagctcagcggggtcgtaggcgtaaacaccagaccggccttgcaaccgtgtgacttgatgagctgtagcgtacggtcaacgtgcagagtcgcttcagggtggaaagtaatgtaggtggccccggcttcagcaaactgtgggatcaggctatcaactggcatcaccatcaggtgaacgtcgataggcttgttgatccccttttcctgcagaaacttgtgcaaggactggcagacgttgggaccgatggtcagattcggcacatagtgattatccatgacatcaaaatgcaccacgtcgccgcccgcttccaatgctttgacggtgtcttcgcccagacgagcaaaatcagccgacagaatggatggagcaatcaaaaaatctttcatctgcttctcctacgtttaaaagtcctttagctatacaacgccaatagctcggttaccttgctgcgctgcaaaatattgctgctgatggttcttctcgccgtcaccacgtggagcgctgcggcggaataccaatcgcgggtcaaggcagtatcgtggttcgaaatcagcaccggcacctggcgttctgccaagagtttctctgccagtttggccagattttgctggtcggtcagattgaagttattggtgtgatacgccgtaaagttcgccgtcgccgaaagcggcacgtaaggcggatcgcaatacaccacagcccctttcttcgccttcagcagagtgtgctggtaatgctcgcatacaaactgtgcattctgtgctttttcagagaaccaggcgagctcgtcctcagggaaataaggttttttataccgaccgaaaggcacattaaaggcaccgctcaagttgtagcggcaaagcccattatagcaatggcggttcaggtataaaaaaagcagagaacgacgatagacatcggcgctggcgttaaactcttctcttaactgatagtaacgctctgactgattgaattcaggcgtaaaaagcgcccgagcatcgcggataaactcgtcgggacgcgttttaacgatgttgtacaggttgatcaaatcgttgttgatatcggccagaatataggcgtcataatcggtgttcaaaaacaccgaacccgcaccgacaaaaggctcaatcaaacaatctcccgctggcagataacgtttgatgtcatcaaccagcggatacttgccaccagcccattttaaaaaagcgcggttcttcttcatgccgtcagttagctacttatacaattcacagccgcggattgtaccctgttttagacagcacatcgcgtacagatcagattcattttttaaggtcttgctgtacttgatgtacaggcttaacccacggtttttttgcttgaacgtcggcaggtaaactggctatcgcgcgttttgcatcagctgaggacgcatagttaccgctcaccagaacaaaccaaggtttgccatcgcgaactgtctgatagacgctgtaatttttaagtccctgctgacgggcaaagttattcaaagaggtcgactgtgatgcgctgctaagctgcagggtaaagtgactacccggcgcagtcttcagcgccgccgcactgcccgactcaacgctctgatgtgcaggcgcactgacagcagcatgatgttcgggttcttttctgatttcaggtttacgcactggctctgccgctttggcaaccggtgttctggtcgacgagctgtggcgttcggcgcgatgctcgactggcgtggttttctccgacgcacggcgaaccgcgtgtggcgctggagcaacggctggagctcggcctttcaggctgctgttgacggtagccggcgcggttggcaacgaggtcagagactgcgtgcccgcgttgataccgtcttgagcggcggcgttaacctggccttgctgctgggaaagcgcgtcgttgatgtcgcctggaagatccacacgctctttctgaccactgtcagcctgtggctgagcctgggtcggcgtagaggaaataggcggcaaaccgatactcttcggctgcgcagacgcgttagcgtcagaaggagcagaagccgcaggcgtttggtcattaggcgtcggcaccggcgtagcggccgggctgagcctgaagtgctcgcgtcagcgttcgcgccagaaagattaatgtctttcggcccgttggacggcgcagccgcgttgttttgcgacggagatttcagtgcagaaccaatgccaagaatcagtagcaacagcacgataatgccgatgccaatcatcaagtattgacgggataccgcaagcttcgggcttgtgaagacggtttacgcgagcgctgtggtcggcggtcgctggtatctggcttaagatcgtcttccggtgttaaatcatccatctaaaatcctccaacccgtcaaaatggcccattcatcaatgattagggccggcaactgttctggcttactgcgcgtgactttcttgagtgcttaaggcacccggcagtcattgattgatgcaagcaccgtatcatgaggcacgcctttacggacttcggacgcgccgattgccgtaggcaggaccagacgcagttcgcccgccagcacctttttatcgcgcatcatgtgcggtaaataggactcggcggtcatctcttgcggacccctgacaggcaggcctgcgcgcaccagcaaagatttaacgcgagcaatatcttcaaggctgaactgaccgagacgatgcgcggtgtaacacgccatcacgatgcccgcagcaacggcttcgccgtgcaaccagacgccgtaacccatggcggcttcgatagcatggccgtaggtgtgccccagattgagcagcgcacgcatgccgtgctcgtgctcgtcggcggcaaccacttcggccttcagctcgcagcaacgacgaatgcagtaagccatcgcgttcatatccagcgacagcagggcatccatgttgttttcgagccatgtgaagaagtcggcatccagaataatgccgtatttgataacttctgccagaccggacgaaagctcacgggccggcagagtgcgcaggcagtctaaatcgaccacgaccgaggcaggctgatagaacgccccaatcatgtttttacccagcggatggttgacggcagttttgcccccaacggaagaatcaacctgagaaagcagcgtggtaggcacctgaataaagcgcacaccacgttgataactggccgcagcaaagccggtcaaatcgccaattacgccaccgccaagagccacgagggtggtatcacgaccgtgaggcttctcgagaagagcagagaagacctcattcagaacagacagggatttgtactgttcgccatcaggcaggataacctgatcaacacgaacgcctgcttgctcaagcactgaacgaactttgtccagatagagaggtgccaatgtctggtttgtcaccagcatgacttgatcacctgcctttacaggcataaaagaagccggatcgttgaacaatccggcggcaatcgtaatgggatagctacgctcccctaacgttacagtaatcctctccatgtcgtgctcaatgaccttcttaacttacaccctcaggctgtggtggaatgccagaatcagttgccttcaatcatgttaatgatttgattagcaacaactttggcgctttggtcgtcggtacggatagtcacatccgctatctcttcgtataacgggttacgctctgccgcaagtgcttcaagcacttcgcgtggcggggagctcacctgcaacaaaggacgtttcttgtcacgttgagtacgtgccagctgtttttcaattgtagtttctaaatatacgacgacgccgcgggctgacaaacgattacgggtttcacgtgatttcacggaaccgcctccggttgccagaacgatgccttgtttttcggtgagctcgttgatcactttctcttcgcggtcgcggaatccttcttcaccttccaaatcaaatacccagcccacatcagctccggtacgtcgctcaatttcgtgatcggagtcgaagaactccatattgagttgttgagctaactgtcgaccaatagtgcttttgccggcacccataggcccaaccagaaagatattgcgtttctctgccatgtttttcggtattactaagacaattcgttgatgataacccgccccgccaatcaaattagcggcgggacctaaactgaaacctcatgagcgatagtgcgagatcagataaaaattatctcaacactcctggtagtttggcaaccgaataaattacatagcgcgccgcaggagggaaaccatacgtttttatcggcgcgatggcattaaataaaaatctcggtgctcaattcggtaacccttgtaagctaaatcggccgcagcgtcaaactcagaagcctttaccgacacaaaaagttgcataagctcaacgttatcgtgcgatttcagtctgacagtatactcaagtaataaaggttattggctgttgatcagcgttggagtgataaaaataactaattcgcgacgttggtcatgcgaagattgctgtttgaacagcccaccaatcaacggtaaaccgcctaatcccggcactttattcacggtatttatgtcttgctgctgaaaaatcccgcccaacaccagcgtttcaccgtcttttaccgtgacctgggttttaatttcctgcttgtctatcgacagggcttcgccctctgcctgctttatcttgcgccccggcatgttctggctgatttgcagcgccagcgtaatcgcaccgttaggaaggattttcggcgtaacctccatgcccagtaccgcctctttaaactcgatagaggttgcgccgctggtcccgctcgagacctgatagggatttcggtgccctgcttgatgctggcggtctgcatgttggccgtcatcaggcgcgggctggcgattatctcgacgcggtccttctgctccagcgccgtcagctccaggctcagcaaccgctcaccgatgcgggcaagggtgaatccggcggtgaccatcggattctcaatgccttgccccatctcgacgttttctaccagcgatgatctggcgcccgtcgccggttggttgagcccccaacgcaggcctaactcgttcaggctgtctcggttcatggtcacgatatgcgcggcaatccgcacctgctgaatcgggaagtccatcgcctcgacccagcgccgtgcgttatcgagctcgggccgcgcatcgcggagcagcagctggttggtacgcgaatcggcgctgaccatcgcacgtagagaaagcagcgtacctttctgggcgttgagctgcgccgccaccgctgtggcatcggcgtgtttaagcccgagcgtcaggctgaccagaggccgcgcctgtttctgccgctcggcctgctcgaccttttgctggcgctgcaccgccagctcagactccgggaaaatcatcagcacgttgccctgtttctgactggtcaatttccccatatgcatcacgacgtccatcgcctgctgccacggcaggttgttcagccgaagactcaaacggccttctacgccctgcccgataatcagattgaggccttgatggtcggccaatgcctgcaagatgaggcctgtcggggcatcgaaaaattcgaggctcaccgtcgttggcaccgccttttcctttaactgtatgactttcggcttttcggcagccatggcccaagtcgctgacagcgttatgccaacgataaagatgatgccgcaccgcgcgcagtcggaagctccgcgcacctgccctttgccgtctttagatttattacgcataagctttttacaataattcatcaagcagtcctccatgacgcgtttcgttgaccctaatcagggcgcacaagcgtgaatatttgttgccgctcgccacactgggcgctgcgggtgcggatacgcacctgcttatcggtcacctcttcaacgtgccagttcccctcggctatcgtcccgcccgcctgcgccttgagccacatccccctggcatcgataagccagccggtatagcgccccgcgccccgagtattcccttaagctgagtcagcgtttctccgtcggaaggttcaccgcaagggcgattatcatctgcctgaaaggggtctcgcagcagcggtgaggcgatgtcagacgctgcccgctccctttgcgcctgactgacgcgccccgcataggtggcgaggtgcagcgtgacgtccagcagcggggcgatactctgattttttgtcacgttgagctgctcaattgccacgggcgcaggctgctgcaacagcagggtctgcaataactgaatcagtccgtgaaaagagacctgtagcctgaaagcgccttgctgttgccccgcgctgacgggcgtcttttgttccggctgccagtgcagcaagcgcccagagaccgcgtctaacggcgccaggagataatgaggcaaagactgcctcacttcagcaggtggcttcagcaaatccagattggcctgccatgcacgccgcgaaggttgcaacagcaacacacgctggcgctgggcactcaactgcctttgttcctttatttgcactgcaatcgcctgagcatactgtttccgaccgtggagcgagagtccgtaaccggccgtgagcagcagcgacagcactaaggcaagcagtaaggcaatctgcccattgggccgctgcatcaggcgcttgagcatttcgcgatattccgttcgcattgatgtttcctttcttttaatcgccgcgggccacagaatcaccgctgggaagtctcgcattgaccgaaaaggacagattcgcggccggaagcagcctcacctcctgcaactgcacctgcggcagctgcggcgcatccctgagacttttactgagcgccaggatttctccgtatgccactccctccccgtcgagccgaaactggacggcactgtcgcttagccgcgtcgcccatacccctccggcaccacccgcgacagatgccgtaagcgctggactacgtgcaggctgcgctgaaaatgcgcgtcgctttgctggttcaatgcctcggccagcctgtagcgttcacccagagcctgtaccgattcgagctgacgttgcagggaaagctgataggccataagcgccgagagctgttgctgccgacttgccgtctgccgttgagtactccaggcagaaaatatcagccacagcgcacagcccgcgattccgcacagcaacagcccgcgccaaaaacgatagcgtttctcaaaggctcgctcacgccaggggagcagattgacgcgcagcatcactggtcggccgggcgaacggccagacccgccgcgatagcgaacgcaccgcagttgggcggaatgggggtgacatctgggaaaaggcggcgaaaggtgaccagttctgcacccccttaggcggcgcagtatcgataacgctagtgtaatagatgtcaccgtcgcaaagtttatgtgccagataaagtggggcgagcgtggggccaagcgagttgggatcggccacctcatcgtcatcaaacaatccaaactggaagggtagcccgtgtggcgatgcccacagccacccgtcgcttaagcggtgcagcagcagcgactctctcgataccccgccgcgctggcggcagactgaagcgcgcaaggcgtcagttcgataacctcagggaaaagcctggcctgcgccagacagtgctgccactgggcaagttcttcccgccgcgctgcggtaacaatcaatcgctggtcatcgcagggttcgacgcgatagtcgattgccagtgactccatcgccaacggcagctgtttggcagcgctagcacttataaaggtatgacgatgcggctcctgcagcctattgtccggtagcgggagacgaacctgaataatccgctgtgcaggtaaacaaatgcgtaatgaaatggttgaaggcaaagaatgacgccagcgcgataaaatggcgattaattgttcggtctcatgtaatattccctgccgcatgaccacctgcggtaacggctgctgccaccaatggcgcaactgccagccgtttcgccgccgttgtacggcgatagctctggcataatcgttttgaatatccaggcccacgtaccatgaacagtgtcgcattgcattacgcttccttgtcgattttagggcatacccggctccgtatcgtgggtatatctatgtggcaggcttgcttttatactctgccttcgactaccgtactgcgcgcgcggctgtttataaactgcccaaatgtcatttaatgggaattatcaggtgaagttcgtaaagtatttattgactctaatagtgtgttgcattgtgctgggagccgcctcgatatatggactctacaaatatatcgaaccacagctgcccgatgtcgcgacgttgaaagacgtacgcttgcagacacctatgcaggtttacagcgccgacggcgaattgatcgctcagtacggtgaaaagcgtcgtattcctctgaaactcgaccagatcccaccggacctggtgcatgcgtttatcgcaaccgaggacagccgcttttatgagcatcacggtatcgatcctatcggtattttccgtgccgcttcggttgccctgtttacaggccgtgcctcgcagggtgcgagtaccatcacccagcagctggccagaaacttcttcctgagtccagaacgcaccctgacccgtaaaatcaaggaagccttcctggctatccgtattgaacagctgatgaccaaagacgagatccttgagctctacctcaacaagatctatctcggctatcgcgcctacggcgtgggttcggctgctcaggtttatttcggtaaaaatgtcgatcagctgacgctgagtgaaatggcggttatcgccggtctgcctaaggcgccgtcaacctttaacccgctgtattcgcacgaccgtgcgctggctcgccgcaacgtggtgctttctcgtatgcttgacgagaaatacatcactcaggcgcagtacgatgcggcccgtcaggctccgctggtttccaactaccatccgccagaaatcgctttctccgcgccttatctcaccgaaatggtgcgtcaggagatggttaaacgttacggcgacaatgcctacaccgacggttactccgtttacaccaccattacccgcaaaactcagctggccgcacaggacgctctgcgtaacaacgtgctggcctatgacatgcgtcacggctaccgtggcccgtcgaaccagctgtggaaagtgggtgaaacgccgtgggaccagaagcgcattgttaactccttgaaaacgctgccggtgtatggaccgctgttcccagccgtagtgacccagattgacgataatcaggcaacggccgtcatggccaacggcgacaacatcagcatgccgtttagcggtatgacttgggcgcgtgccttccgttctgacaccagccagggcccgaatccgaagaaagtcggtgacgtggttcagccgggtcagcaaatttgggtgcgcaaggtcggcaacgactggtggctggcgcaggtgccagacgtcaactcggcgctggtgtctctgaataacgtgaccggtgccgttgaagcgctggtgggcggattcgactttaatcagagcaaatttaaccgtgcaacgcaggcgctgcgtcaggtgggctcgaacattaaaccgttcctgtacaccgccgcgatggacaaaggcctgacgctggcgaccattctcaacgacgtgccgatcacccgctgggatgcaggtgcaggtaccgaatggcgtcctaaaaactcaccgccaacctacgatggtccaatccgcttgcgtcagggccttgggcagtctaaaaacgtgatgatggtgcgtgcgatgcgtgcgatgggcgtcgactatgccgcagactatctgcagcgtttcggcttcccgcctgagaatatcgtgcactcggagtctctggcgctgggttctgcgtcctttacgccaatgcagctggtgcgaggttatgccgcgctgaccaacggcggctatctgattgatccgtacttcatctccaagattgttgatgagtcgggcaagaccgtcttcgaagagaagccgcgtattgcctgtgaaacctgcgatattccggtgatttacggcaactcgcagaaaaccgccgtgctgtcggatgacaacgtcgagaacgtggcggtctccaacgagccaaataacgccaccgttcctcaaccgcagcttgaacaggtgacgccgggccaggtacagagcgatacccagcaagagtacgcgccacacgttatcagtactcagctgtcgttccttatccacgatgcgctgaacagcaacatcttcggcgaaccgggttggatgggtaccgcatggcgcgcaggacgagaccttaagcgccatgatatcggcggtaaaaccggtaccaccaacagttcgaaagatgcgtggttctcaggctacggtccgggcgtcgtgacctcggtatacatcgggttcgacgatcaccgtcgtgatttgggccgcactacggcatcgggcgaaatccctgaccagatctccggttatgaaggtggcgcgaagagtgcacagccagcgtgggacgactacatgaagaccattctggatggcgttcccgagcaaatgctcagcccgcctcctggcatcgtgtcggtcaaaatcgacaaacgcagcggcaagctggccgatgggtctgccgacagccgcatggagtactttattgatggaactcaaccgaccgagcacgccgtgcacgacgtcggtaccaccatcatggataacggccagtctaaagagctgttctgatgcctgcgggcctctgaatctcggctgattcgccaataaaaaagccggactgggaattctcagtccggctttttcaattctgaattctattcatcagcgcgtgagaaacttgtgcgccaaaaacagggcgctaacgttccttgcctcattgaaatcaggctgctccagcagttccatcattcgggcgataggccatcgcgtttgcggcaaaggctcaggttcatccccgaccagactctgcggataaagccccttggcaatcacgatgttcatccggctggaaaaataagacggtgccatcgtcagcttggccagcacgtcgaaatgctgtgcgccgaagcccacctcttccatcagttcacggttagccgcttcgagtacggtttcacctggatcaatgagccctttaggaaaccccagctcgtagctctcgatgccgacggcgtattcatgaatcagcagcaaatcgtcacccacgatcggtacaatcatcaccgcttcgcgatccgaaggccgcatcctttcatagacacgctgttcgccattgctaaacgtcaaatcgacagactcgatggtaaacaaacgggagcgggctacagtgtcaactttcaggatcttaggtttttgcaggtgcttatccatatcgtccccaataatattatccccttgctacgaccaacccttaccgcagccagcctgtactacctaacattcacgattcctataatgcgttaatgctcacccgtatcgcaatctttcaacgcgattctttacgtaatgcctgcctttactgttccatttgtgtaacatctgcgtacctcacggtacattcgaggtgttagcaaattcagagatgattaaaaataggattatgccgatacccattttgggcaagagattgttatgattcaaagtggtatggactgtgtgaaacatttcttcatacctcgattcagactaacaaatactttgattacaataataaaactttttcctgatagtagcttttctgataagagacaggttctaaacacttttgaactttatatttcagatttcaatatgtttaaatttttcaatcagatgactcaccacgcctgagtctgaacggggataggatgagtacagtcgtcgagacgctgattttattgtgtgcagttctcctcatcgcgggcataggcctgagatttgtgctgcaacgccgacggttagcctcttccagcatacatttttcaaaaccacaccagcgcaaactgactcaacaggagcgcgacgctgttgaaaagtatttccgccagaacgatcctcttagcccaacgccaatgacccaccgcagcaacctcatgctgcagcgcgacaagctagctctgaccgccaaaagcgagagcgtttattccgttacccgcgccattacccgctacgggctggccagtgacgatccgaataaatggcgctattttctcgagaccacggaaattcacctgccgctgttctgggaacagtacattgcgcaggaaaaccacgtcgagttaatcaagacacagactatcccgctggtcatctcgctcaacgggcattcattggtcgaccatatttacgaccgtgcctcggtgacctctgcggtggttgccccgccgccgcgtaacgcgtctattcgccccgaagagagtgaccacgtcgaactggtcagcgtgcgtcaggaaaccagagaagaacataagcttacccagtcgaacggcgtgagcgaggcgattgccctgtcgctggcgatgatactggtgtttattgcgctgattggtccgccggcaatcctgccgtggatgatggcacttacgttgctgttggcggcgtgggtaggttggcgattgctgtcggatatgctcggccgcaatcgcaaagagatccactgcctgcgcggcatgcctaagcgctggggcctgtttggcgaatcgaaacagggcgatatcagcaacatttcgctcggcgtggtagacctggtttatccgtcacactggcagtcctacattggccgtgagctgggtcaaaaaaccaatattgacgtctatctcaacagccaggtggttcgtcagggccggttcctttccttgcacgacgaagtcaaaaactttccgctacagcgctggggcaagaatctggttctaacctgtagttcactgtttttgctgctgatgctgctggcctacgtgcctcttagcctgtcgctgaaactcagcgtagcctggcttcagggcgcgcagagtacgcaggtcaacagcgtggccgcgttagaaaaaacgccactgcgcgttggcgacacgcttaaagtacagggtactggcatgtgttatgtgccgccacatcttagcagcggcaacacgtcgccatttttgccgtttgactgttcttcagtgtactggaacgaggccactccgctgcctatcccacagtctgaaacgattgaagccgccgatgacctaatagcgacggtgcacaatcagctgcatccgggcagcgcgggtaacgagcaaagcatcaacccgcagctggcgaccgccatcgagaaatccggcatgattctactcgacgacttctcggacattgtgctgaaaaccgaatcgctgtgcagcaacagcgaagactgcgtgcgtttgaaaaatgcgctggtcaatctgggcaatgccgataactggagcacgctggtcaaacgcgctaagtcaggccagcttaaaggcatgaacgttctgctgcgcccggtaagcgccgagtcgctcaatgaattagtcaacagcgcgacgaatgcgttttactcccatgaaaccctgcgcgcggcttcagcgcttaacagcccaccgccgggcggtttcctgatcagtaacgacgaaggcaaacagttggtgccagaagcccgtcctgctctgtcacttttcgcctataatccgctggaccaatggaaacagctgcaaaatctgtcatcaatgctgttgcatactcgctttgcagcacagggtgtcatcaccaacatcagcattgatgccaacggcacgcgccatatctcgctgcacagcgaaccggatatctcgacgctgtggcgctatctcggcacgaccatcctgctgatggggttatcgccacgctgttgaccaatgtcgtgctgttgattaagcgccgcataaacgacaggcagcggatggaaaaaattcaggcctattacagcagctgttttaatcccacgttgatgtcgtaaccgttgctctgcgcgactgacctcatcaaagattgaagagtacagagagatgatgctggacctggactggaataacattgataccgtactgctggatatggacggcacccttttggatttagccttcgacagccatttttggcttcagcaggttcccatggcgctgagcgagaaacgccagatatcgctgcagcaggccaggcagcacatccacgaggaatatcttgcagtacagcacactatgaactggtactgcttcgcctattggagtaaaaagctcgacctggacatctaccagatgaccacggatattggcagtaacgcgaaactgcgcgaagatactacgccttttttaacacagttacgccaaagcgggcgacgcaccatcctgctaaccaatgcgcatccgcacagtctggcggtgaagattgagcatacgggtttagaccagcaccttgatttattgctttccacccacacatttggttatccgaaagaagatcagcgcctttgggctgccgtccagcagcaaaccggttttgatccggcgaggacgctttttgtagacgacggcgaacctattcttgatgcagcgaaggcctacgggatccgctactgtcttggtatagaaaatcccgactctacgatggcgacaaagtcatttcagggtcatccttcaatcagtgattaccgctgtctgttacctttgggttaaccggcgcggcctcagcagattatgccctgcccgaaacgggaggaatcatgaaggcaaaagcacagcaacaggatgataacgccgttcgtctcgacaaatggctgtgggccgcgcgtttctataaaacccgcgccctcgcccgagagatgattgaaggcggcaaggttcattacaacggccagcgtggtaagcccagtaaactggtcgagcttaacgctgagataaaactgcgtcagggcaatgacgaaaaagtcgtggtggtgctagacgtcaccgaccagcgacgcagtgcagaacaggctcaaacgctttatcaggaaacggaagccagcgtggccaatcgggagaaaatctctcaggcccgcaagatgaatgctctgacgatgccgcatcccgacaggcgtccggacaagaaagaacgccgcagcctgattaaatttaaatatagcgatcaagaataacgtcctctgcgttaaccgctgcaagggcacgatcgccaaaaagagaacgtaaactatgtctaataaagatcaattacaccgttacttattcaatcatcacgccgtgcgcggcgagttggtatccctgagcgaaacctttcagcaaatcgtagatggccatgattatcctgctgaagttcgcacgctgctgggcgagctgctggttgcgaccagcctgctgaccgccacgctgaagttcgacggtgacatcaccgtgcaggttcagggcgatggtcctctgaagctggcggttatcaacggcaacaatctgcaagaaatgcgtggcgtagcgcgtctgcagggtgacatcgccgaaggcagcacgctgaaacagatggtcggcaatgggtatatggttattaccatttccccaaccgaaggcgagcgctatcagggcgtggtgggcctcgaaggggaaaccctggcagaatgtctggaagattacttcctgcgctcagagcagctgcctacgcgcatctttatccgcaccggtgagtcggaaggccagccagcggcgggcggtatgctgcttcaggttctgcctgcgcaggaaaccgatgctgaagagttcagccacctgtctcagctgacaaccaccatcaaggcggaagagcttttcaccttgccagccaacgaagtactgtatcgtttgtatcaccaggaagaggtgacgctgtacgaaccacaggacgtttgcttcaagtgcacctgctctcgtcagcgttgtgctgacgcgttgctgacgctgccggatgaagaagttctggaaatgcttgaagaagatgaaaaaattgatatgcactgcgactattgcggcagtcattacgtgtttgacgcgatggacatggtatcgattcgctcgggcgcaaacagcagcaatgacagcattcactgagtaaatcccgcataaaattccacctgaggagcagtttaatagctgctcctgttacattactccgtgctctacatctcaaatctaccaaaaatgttccaatagcttcaattatttggtgactcccgtgtaaaaggactattgttctccctacaatatcgcgcagacagacgatgtatataaaggagcagggatatgtctagtacacctttttcagctgatgagctggcccagtacgggatcactcaagctaatgaaatcatttataatccgagttacgaagtgctttatcaggaggagttggctcctggtctggaaggatttgaacgcggtcaattgaccgagctcggcgctattaacgttgatacgggtatcttcaccggccgttcgccaaaggacaaatacatcgtccgtgacgacacgacccgcgacaccgtttggtgggcagatcagggcaaaggaaagaatgacaacaagccgttgagtcaggagacctggcaggagctgaagcagttagttggccgtcagctttctggaaaacgcctgtttgttgtcgatgctttttgcggcaccaacgagaattcccgtctgaaagttcgcttcgtcactgaagtggcctggcaggcacactttgtcaaaaatatgttcatccgtcctaccgatgaagagttagtcggttttaagccagacttcgtggtgctgaacggcgccaagtgcagcaatccacactggaaagagcagggtctgaactccgagaacttcatcgcgttcaacctgactgaaggcgttcagctaattggcggcacctggtacggcggcgaaatgaagaaaggcatgttcgccgtgatgaactacctgctgccactcaacaacatcgcctctatgcactgctccgcaaacgttggcgagaaaggcgacgtggcggtgttctttggcctgtcagggaccggtaaaaccaccctgtctaccgatcctaaacgcaagcttatcggcgacgacgagcacggctgggatgacgaaggcgtgttcaactttgagggcggctgctacgcaaaaaccattaatctgagccacgaagccgagccagacatttttgccgccatcaagcgcgatgcgctgttggaaaatgttgccgtcaatgagcagggcatcattgatttcaacgacggtgctaaaaccgaaaatacccgcgtgacctacccgatttatcacatcgataatatcgtcaagcctatttctaaagcaggtcatgcgaccaaggtcatcttcctgaccgccgacgcctacggcgtgctgccaccggtctcctgcctgaccgacaagcagaccgaatactacttcctgtctggcttcaccgccaaactggccggtaccgagcgcggcgtaaccgaaccgacgccaaccttctcagcctgcttcggcgcggccttcctgacgctgcaccctacgcagtatgcagaagtgctcgaaaaacgcatgaaggcgtctggcgcgaaggcttatctggtcaacaccggctggaacgggaccggtaagcgcatctcgttgaaaaatacccgtgcgattatcgactccatcctcagcggtgaaatcgacaatcagccaacgactcagctgccaattttcgacctggcggttccacagtcgttgccgggcgttgacacgcagatccttgacccacgcgacagctattcaagcgcagagcagtggcagagcaaagctgaagatctggccacgctgtttgttgaaaacttcagcaaatacactgacaccccggccggtgccgctctggtaagcgcgggacctaagctgtaatggcgacgctgacgattcgcaaccttgatgacgaagtcaaagatttgctgcgactctcggctgcaaaaaacgggcactccatggaagaggaggcccggatcattctccgccaggcgctgcaaggcagccagccgagctatggtttaggcagcagactgcaacagcgtttctcgcagagcggtggcgttgagttggctttaccacaaagaagtgaagcatctcgtcaaagagacaacgacgaatgattgtgcttgatacgccggtgatagcggaaataatgcggccaaaaccgcacaaatatttgctggagtggctgaacgcgcaggacgcgcagcagctgttcctgaccgctatctccgtcgcggaactgtttgccagcgcggaatgcctggcagacaaccgccagaaagcgcaggtttcgacgttgctcctcgagatgcttaatcaagactttgccggcagactgctggccttcgatgcgccgagcgcgttgatttacgcccagctttacgctgagaatcaggcgtaccctaccccattgaattacaacgaattacagactacggcgatttgccgacaccatcaggcgcgactggcaacctccgaggttgcgcgcttctcgcagaccggcattgcgctgctcaacccatgggaaaaccagggaagcccgcgctggcgcgaagaagcagccgaatactttatcatgagtcgcaaatcttaatcccttacgggctaggtgcgggcgatcaaatgcccattgaagctgtcgaagcggagcggaaaagttcctcggagtcctatgaagccgacctccgaggcctttgcttttaagactctgtcgttgatgccgccatcggctcccgagtcaccctcggaagataagccctaaaccgcagcccaccgcgcggactcttgccgatatccaggctgccggcgtgtgcatcaatgatacgctgcacgatagccagacccagcccggttccactgatggtacgcgcactgtcgccgcgtacgaacggctggaacagatgtgccagctggtcgggctcaatgcccggaccatcgtcctcgacctggaaccagctacgattcagctcatgaccactgctgaccttgatccaaccattaccgtagcgtgccgcattgacaaccatgttcaccgctgctcgtttgatggacaacggatgcacgttgaccagcacgtcgccatcgaccaggtcagtttcaatctcgcgctcgtagccgctttctgctgccaccacttcgcccagaatcgagttaagatcgcaaacttcagtctgcatctcctgcccgtgcgcagataatcaataaactgctcgataatcgcgttactttcttcgatatctttattgattgattcagcgaggtaaccgtcttcactgctcatcatctcggtcgcgagacgtatacgcgtcagcggcgtgcgcaggtcgtggctaacgccagccatcagtagagttcggtcatctgccagctgtttgacgcccgcggccatctggttaaacgcccgggtcactgaacgcacctccgaggcaccgtattcgcgcagcggcggcggaataatccccttaccaacctgcaacgcggcgtgctccagttcaaccaagggtcggttctgaatacggataaacagccaggcaccgccgatagccagcagcataatcgccagcgtgtagcggaacagcggcgagaaatcgccctgatggatctcggtcaacggcacgcgcacccagatgtcaggcgacaaccaggttttgagccatacgaccggggtatttttgtttacttcgacacgaacatcggtggggccaccaagttgctgagccatttgctggctcagaaactcgtagtgctgcgcccagcgtaaaccactctcttcggcagcagagttagtgtacagcgagatgcccagctctcggtaaatctcacggcgaaatgccggaggcacttccagtagtgtgccgtcctcaagctgcagcttgtcggtcatcagcatacggacttcgtaggccaggactttattgaactgctgcaaactcggcaggatagcgaaattcagcaccaccagataggtcgtcaccaggctgacaaacagcagggtgacgattaaaagcaaagtacgggcaaaggagctacgcggtgaaaagcgtattttcctcatgccttactgccgtccggtacgaacacatagcccaggccccaaacggtctggatataacgcggatgcgccggatcttcttcaaccatgcggcgaagacgcgagatctgtacgtcaatagaacgttccatcgcactgtactcacggccgcgagccaagttcatcagtttgtcacgagacagcggctcacgtggatggcttaccagcgctttcaacacggcaaattcaccgctggtcaaaggcataggctcgtcttcacggaacatttcacgcgtgccgagattaagtttgaacttaccaaacgaaatcaccgcttcttcctgcgaaggtgcacccggcagctcattggcctgacgacgcaacacggcacggatacgcgccaacagctcgcgcgggttaaacggttttggaatgtagtcatcggcaccaatttcgaggccaacaatacgatcgacttcttcacccttcgcggtcaccatgatgatcggcattgggttgctttggctacgcaggcggcggcagattgacaggccgtcttcacctggaagcatcaggtcaagcaccatcaaatggaaggattcacgcgttaataaacgatccatttgttcagcattggcaacgcttctcacctggaagccttgctcggtcagataacgttctaaaagtgcgcgcaaacgcatgtcatcatcaactaccagaatcttgtgattctcttgcattttcttactcccaaaggcgctaatacctgaagccggtattgttaaaaaagctggctataaccaacagcttttaatggtatatattctagtcgaaattgtaacaatgcttatggtttgcccaatttatcaataaattttagggatttcacgccttcttgcagcaaaaactacgccgctaagggtctgttcatatctttatgctttttacacttttgggcgcactctccttttgcaggcaaaaatctcggcaatagagggtttccctgatgcgtttcactgagttattctgccctgatagacaaaatccggataaattccggtgaacactgtttccacctcctcagataaaaacgaagaagccgatgaaaaccaagctgataactcgcgaaggctaccagaaactcaagcaggaactcgactttctctggcgggaagagcgtcccgaagtcaccaaaaaagtgacctgggcagccagccttggcgacagaagtgaaaatgccgattatcagtataataagaaacgcttacgcgaaatcgaccgccgggtgaggtatctcaccaaatgcatggaacagctgcgcattgtcgattactcgccacagcaggacggcaaagtgttcttcggtgcctgggtcgagattgaaaatgacgacggccagacgatgcgttttcgtatcgtcggctatgatgaaatctttggccgcaaagactatatatccatcgattcaccgatggcccgtgccctgctgaaaaaagaggtcggagacagcaccgtcgtcaccacgccggtcggcgatgccgtctggtacgtcaacgagattgactatactcaaggcgaatgaccttccaagtttctcaaaacgccggtcaccacgcgtggatggctggcattttgggcgttcaaaacgtataactgtccccctgttttcacgtcatctacttatacccaaagtaagataaaaaacttatgaatgatcaactgagccgcattatcgcgacagaattgcaggtacgtccggagcaggttgcttctgtcgtccgcttactggatgaaggtaataccgtgccatttattgcgcggtatcgtaaggaagtcaccggcgggttggatgatacccaactgcgtcagttggacacccgcctgggttatttgcgcgaactggaagaccgtcggcagactatcctcaagtctatcgaagaacagggcaagctgagcgatgacctggcgaaggccattagtggcacgctgagcaaaaccgagcttgaagacctctatcttccgtttaaaccaaagcgccgcacgcgtggccagattgctatcgaagccggtctcgaaccgttggccgacttgctgtggcaggacgcacaacaagagccagagcaggccgccgccgccttcgtcgatgccgataaaggcgtaagcgacgtgaaggccgcccttgacggtgcccgctacgttctgatggaacgcttcgccgaagacgcctctctgctggcgaaagtacgtgactatctgtggaaaaatgcccatctgacctcgcgtatggtcgagggcaaagagcaggaaggcgcgaaattccgcgactatttcgatcatcatgaaccgatttctcaggtgccttcacaccgtgcgctggcgatgttccgcggccgcaatgaaggcgtcttacagctgggcctgaatgccgatcctcagtctgatgaaccgccgcgcgagagctatgccgagcaaatcatcatcgaccacttgggcctgaagctcaacaatgctccggctgacgtctggcgtcgcgcggttgtcaactggacctggcgtatcaaagtgttgatgcaccttgaaaccgagctgatgagcaccgtgcgcgaacgtgccgaagacgaggctatcaacgtattcgcccgcaacatgcacgacctgctgatggccgctccagcggggatgcgcgccaccatgggtctcgatcccggtctgcgtaccggcgttaaggtcgccgtggtggataacaccggtaaactggtcggcaccgacaccgtctatccccacaccggtcaggcagcgaaagcagcccaacaggtcgctgcgctgtgcatcaaacacaacgtcgagctggtggctatcggtaacggcaccgcctcacgcgagaccgaacgcttcttcatcgagctgcaaaagcagttccctgaagttaaagcacagaaagttatcgttagcgaagccggagcctcggtctactcggcctctgaactggcggcgctcgagttcccggatctcgacgtctctattcgcggcgccgtgtctatcgcccgccgcctgcaggacccactcgccgaactggtgaaaatcgacccaaaatctatcggcgtgggccagtatcagcacgatgtcagccaaagtctgctggccaaaaaacttgatgccgtagtggaagactgcgtaaacgccgtcggcgtggacctcaataccgcttcggttcctctgttgacgcgcgttgcgggactgacccgcatgatggcgcagaatatcgtgaactggcgcgacgagaacggccagttccgcaaccgtgaacagctgctaaaagtcagccgtctcgggcctaaagcttttgaacagtgcgcgggcttcctgcgtattaaccacggagataacccgctcgacgcctcgaccgttcacccggaaacctatccggtagttgagcgaattttggcggcgactcagctggcgctgaaagagctgatgggtgactcaaacgtactgcgtgggctgaaggtcagcgagtttaccgacgacaccttcggtgtgccgaccgtcaccgacatcatcaaagagctcgaaaaaccgggtcacgatccgcgtcctgagttcaaaaccgcgaccttcgccgaaggcgtcgagaccatgaacgatctgacgctgggcatggtgctcgaaggcacagtgaccaacgtcactaacttcggtgcttttgttgatattggcgtacatcaagacggtttggtgcatatctcttctctggcgaacaagttcgtagaagatccgcatactgtggtgaaaaccggcgatatcgtgaaggttaaagtcatggaagttgacctgcagcgtaagcgtattgcgctgacgatgcgtctcgacgaacagccgggtgaaggcccagcgcgccgcagcagtggctcgcctgcaccggccacggccaaaggacgtgaagcaccgaaacgcgggaacgcggcaccggccggtcgtggcaacgccagcgcgggcaacaatgcgatggctgacgctctggctgccgccttcggtaaaaaacgctaaacagaatagggggcagcgatacgcctgctcccttatttttcccttattttgccttaatttccccttcttaccccttttaacctgagctacatcaataaacgcccttcccctgaggattagcatactcacgcaccgaaactattcttcgctgccggactgtctcaccccttccgcaaatcagtaatgattattattagccttactgttcaataagttatgcaaacaggatgcaaaactttggtcccaaaggacactacagaggttcaccatgcactttcagactcagcgctgctacaaagtcatcggcttctctcgtgatatcagccccgcctaccggcaaaaactgctgtcgctcggcatgctgcctggctccgaattcaacgtgctgcgcgtcgccccgctgggtgaccctatgcagatagaaacccgacgtacctgcctcatcgtgcgcaagaaagatttgcagctgctgcatgtcgagctgcaggagcaaagataacgccatgaaagcaatgacaataggcctgattggaaaccctaattcgggtaaaaccacccttttcaaccaacttacaggttcacgccagcgggtgggtaattgggcgggtgtgacggttgagcgtaaggaaggccatttcctgaccggcgagcacagggtaaaactggttgacctgcccggcacttattcgctgacgactatctccagtcagacctcgctcgacgagcagattgcctgccactacatattaagcaacgacgccgacctgcttataaacgttatcgacgcctccagtcttgaaagaaatctttatctgacgctacaaatcctcgatctaggtatcccctgtatcgtggcgctcaacatgctcgatatcgccgaaaaacaaaacatcactatcgatatcaagatgctctctgcacgcctcggttgccctgtcgtccctctggtttcaacccgcaccgacggaatcgcggatttaacagccgcgatagactgcttcccacaggcgctcccactccagcgcgtcaattatcctccggcgctgatgcatgccatcgttaatctggccgaagccatgcctgtcgatctgccgcatcaaagacgtgactggctcgcggtacagatgctcgaaggcgatatctacagcgcgacgcacgccggtgatgccaacacgcgactgcctgaggtgcgggaaactctcgtcgaggccaatgttgctgacccgcgctggcgattgccgaagcacgctacatctccataaatgcgataggtgccgccgccagtaacgcgcatctgagctcgcctcataggctgacgcaggcattggacaaaatcatcctcaatcgctttctcggcgtgcccctctttttgctggtgatgtacctgatgttcgtactggccatcaacatcggcggcgcgctgaagccgctgtttgaaataggttcagcgacgatatttgtcgacggcattcagtggataggctattcactgcattttccggtctggctcacgctgtttctggcgcagggcattggcggtggaataagcaccgtgatgccgctcattccacaaattggcatgatgtatctgtttctttcctttctcgaagactcgggatacatggcccgcgcggcattcgttatggaccgactgatgcagtcgctcggtctgccaggcaaatcttttgtgccgctgattgtcggtttcggctgtaacgttccgtcgattatgggcgcacgcaccctcgacgccccgcgtgagcgcctgatgaccgtgatgatggcaccgtttatgtcttgcggcgcaaggctcgccatctttgccgtgttttctgctaccttctttgggcaacacggtgcttcggcggtcttttctctttatctgctcggaatcaccgtcgccgtcatgaccggtctggtcatgaagcataccctcatgcgcggcgaggcttcgccgttcatcatggagctgcccgtttaccacattcctcagttgaaaagtttgctgaaacaaacctggcagcgcctaaaaggcttcatcctgcgtgcgggtggcgttatcgtcattgcctgcgtatttattggtgcactaaacagtttctcactgagcggcagggcggccgacggccttgacgactcggcgctggcaagcgtcagcaaggtcctgacgccggtgctatcgcctataggcgtgcatcctgacaactggcaggccacggtcggcctggtcaccggcgcgctcgccaaagaggtggttgtcggtaccttaaacacgctgtataccgccgacagaatgaagtcagaaccctttgatgccaacagctatgaccctgcaagcgcgctgcgcaatgccgtgcgtgaaaccgggcagagtctggtcgatacctttagcctgagcgtactggcgaaccctatcgaggccagcaaaggtgacagtgaaatggccgccagcgcgatgggcgtaatgagcgccaaattcggctccgccgtctcggcctacagctatttaattttcgtgctgctctatgtgccctgtgtctcggtgatgggcgccatcgcccgtgaaaccagccgcagctggatggcgttctccattctctgggacttaacgttgcctactcactggcaacgctgttttatcaggcggcaaccctccccgaacaccctcttcaaagcctgaccattattggcgcagtgatcgtcgttaatggttttattcttatcggattacgccgttcaaaaagccgggtttcgaacagggtgacagacatcatcgcagtgagtaaaccgcgggtatcaagtggctgtaaagggtgttcagaagggaaaaaatgcggaatatcttaaaaaaactcatgacattcaggcgttgaaatcagcatcagagttaggtttatgacatgagggtaaagcaaacagctaccctcatgtcgatgaggtgacggttatttaaacacttctgccgtcgcactgattttattatcagtgtcagcagagatgacaacaaaatatttaccgcccttctcatcggccagtttagaaatagcctttttcgcatccattggcgccgtctgctcattatcaatagatacggtgcccagactggtgtagttatttttctgcgcatcttctcgggtgatttccttggccgccatcgcgccggcagagaaagtacccactaacagagcagcaacaaccattttcttgtaattcatgacattacctcttttattaggtgaattatttttaaaagcagtcaagataacgcacgccagaccctctgcgtcggcagtgaacttcccgcccaaataccgcaaactctcccagagacacagacgccgataaagcgcatacagtcgcgtttcatcaaccgtccggcgttaccttattgagtattaatcaccgtgagaaattatccataaaagaggtcacgacccgccacttaacctttattttgtgaagtggcgcattgttttagagtatgaaattgaaacgttacatcagatgattttcgtcaagaaaatccgtaactaatgcactgaaggcatcaggatgtgacacaaaaggcgcatgcgaggctttttcaacgatggcggaacgcgaatctggccatcgggcgtccagcagaggcacaattttacgcggcactaaaccgtccaatgccccgtaaatacgcaggaacggcatctcaagtgacgctagcgctaaacgcaggtcctcctggttgagaatatccaaccctcctgccaaaacctcaaccggaggaatgggcaagttcagcaccatcgacttcaacagtttggcgtcctgacgtgcgctttcactgcctagcgtttgcagggccagaaaacgttctaccgtgcgctgaaagtcttcgctcagctgctgctgaaagccatgaagcacctcatgacgaatgcccggccactgctcgtcatcgcgtgcggcaaagcacggtgaggaagaaacggtaatcaatgcgtcaactcgctctggggctgttaacgcagcctgactcgccaccagcccgccaagcgaccaccccatccacaccgctttttttggtgcctgtgccagcacgacctcggtcatttccgccagcgaaagcgcaccgaaatcttgactacggccataaccgggtaagtccaccagatgcaggcgaaaatgcggtgcccatcgctcagcgatgtaacgccacacttcggcgttcagtccccatccgtgaagcagcacaatatcgcgcgatccttcacctaaagtctgccaatagagacgattcatactgtagtgtccatgtctgttgttcgaaaatcagcgccgacctgcgagaggcagctcggcgatttcatcagggatgatttcattatcatggtcatgatagcgagtatgttaaccattgccagccgctgttggctatgccagcagccgctgcatattgcccgacatggcctatgcaacctgtgtatcaggcacttcccgcccctccctctttgctgcccacgctgtggattaccgagcggaagcgcgcttcaatcctgcggccgctgcctgattaagccacccgcgtggcagtcgctaatttttgctggtgtctatctgccgccgctcagcacactgctgttgcgtctgaaattttcctctactcctgagttggccgaaccgctggcgaggctgctgctattgcgctggctggagcgctggcgagacggcaacgttgtcaggccgaacaccatcctcagcgtgcctctgcatttacaccgtcatcggcaacgtggctacaatcaggcagaactgctggcccgccctcttgcccgctggctcggctgtgaatatctgccctatgcgcttgaaaggtgtcgcgctacgcctccccagcaacagctttcggaaactgaaaggaaacttaacctaaagcgcgctttctgctgcaaacaggacctggagggaaagcatatcgcgctaatagatgacgtggtgacaaccggtagcacgattagcgaagtcagtaagatactgaataaaaacaatattgcctcattacaggtttggtgcatttgccgcaccttgtagtcagtctgttaaagggcgtattatgaccaattagagtagtcaactattgagccaatgctatgatcattattaccgatgctgcccaagagcactttgccaaacttttggcaaaccaggaagaaggcacccagatccgcgtattcgtgattaacccaggtacgcctactgccgaatgcggtgtttcttactgcccacccgatgccgtggaatccacggataccgagctaaaatttgaaaggctgtcagccttcgttgatgagcttagcgcaccttatctgcaagaagcagaaatcgacttcgtgaccgatcagctcggctctcagctgaccctgaaggcacctaacgccaaaatgcgcaaggtttcagacgatgcccctctgatggaacgcgttgaatatctcctgcaggcgcaggttaacccgcagctggcaagccacggtggccgcgtgtcactgatggaaattaccgaagacggtatcgccgttctgcaattcggcggcggctgtaacggctgttcaatgattgacgtgacgctgaaagacggtatcgagaaagaactgttgcaggccttccctgagcttaaaggggttcgcgacctgaccgagcaccagcgcggcgagcactctttctactaagtcatcttgctgcaaaacaccgtgcctcccgttggcacggtgattcatacccttctgcgccgcttgtccacatccttcagcagtaaattaatcctttcatcagcaaacatctcctcgagcgacatcgtgagctttctgcgccaattcgggtattcggaactggttccgggcacgttgaccggcgtattcatatccagccagtcttcaggctgtagcccgagcaaagcactcgcgctttcggccacgtagcgctgtagcccgcgattcaacgccggactcatcggcatgcgttcagcgtgggttcccaaactttttggtacacagtgatgacgatgcagagcatcgagcaacgcctgtcgcgttagtgctcgctcgcgccgcagatgcgccagcactgcctcatcgggataaatgcccagcttctcgcccaggcttaaatcgtcgtcctgccaatagccgcgcagcgtcggcaagtcgtgggtggtgatagtcgccatcgcctgtaccacatagtcttcaggcgcacggtagtgtaagtctttatcgtgctcaaaatagagcaccttgtaggaatagaccccgctgtcacgcaggctagcgactatctccttgggcaccgtgcccagatcttcaccgatcaccatgcactggtggcgctggctttctaacgccagcacgccaagaagatcgcgcagcggatagctaacgtaggcaccaaatccagcgtgctcgtcttttgggatccaccacagccgaagcagccccatcacgtggtcgatacgcagcgcaccgcagtcgcccatattgctgcgcagcagatcgatgaagggctggtaggctctggcacgcatcacgtgagggtcaagcggcggtaatccccagttctgcccctgcggcccaaggatatccggtggagcaccgacggtcgcgcccatgcaataaagagaacgattacaccaggtttcggcaccgccttcggccacccctaccgctaaatcacgataaaggccgatcggcatctcgagcgcgaggctggcctcatagcatgaggcaaactgcacgtgcgccagccattgcaaccagagatagaactccacctcatcgtaataatgttcaacaaattcatgtaccccggggtgatgaggatcgcgataaggcttcggccataccggccatccccactgtccttctgccgtctgattgaggtgcacgtgcagggcgtcaaacaccgcttgctgcttcaggctctctccgcccagcaggacgaaagcgcggaaatcacgctttcgctggctggcctcgggaatactccggaacgtctgccacgccagttcgagcgcggtgattttcagccgcatgacctcgacgtaatcgacatagtcaacgctgcgcacctgttttagcgcatcacgggtggcggtacactgccaccagctttgggcgctctcagactgctggaactcctcgaccgcgttaacgtcaacgtagactacgttgagccagcggcgagaagacgggctgtaagggctggcgctgagaggattcgccgggtaaagcgcgtgaatcgggttgaggcccacaaaggctccgccacgctgccccaattgctcaaccatctgtttcagatcgccaaaatcgccaactccccagttattttcagaacgcagggtgtaaagttgcacgcaggcgccccaaagcttctcaccgcttttcaacgcctcaggctcgtagcaacgctccggcgcaacaataatccgacacccccactgctcctctccccacttcaaggtgaggtggtgatagccggtcatgtagtcgtcgcccagctccagagactcgccaaaaatgccggtcccttctgagatatcgccgttttccagcgtcagttgccaccgatactgaccttccccgcgcggggaaagatcgaccggctcaccaacgataaacactttcacgtgagaaagggggccgacgtcaggctcctgctcgtcgcgccccatcgcttctaacaatgcctgcttggtctctgcagagacggattgcacctcgtcaaccatattgataaagctgtccagaataccagcccgttttgctgccagttcgagttgctcgccccgcatgcttgctccttaacgtttagcctgccaaatgcgctgctggtaatcgcgaatcgaccggtctgaactgaacatcccgacccgcgcggtgttaagcaccgtgcgttttgtccattcatcgcggtcacggtaaagcttgtcgaccttgtcctgagcctcgcagtattcagcgaagtccgccagcaccagatagggatcgccgccgtcgagcaggctatgcagcagaggttcgaaggcttttttgtcgccgttgctgtagaaaccgctcgccagctcatcaagaatagctttgagtcctttgtcctttttaagccacgttttcggcttgtagccttttttcaccagcgccttcacttcatcgaccgtgttaccgaagatgaagatattttcgtcgcctacctgctcggcgatttcaacgttagcgccatccagcgtgccgacggtcaatgcgccattcagcgccaacttcatattaccggtgcccgaagcctctttaccggcagtcgaaatctgctctgagacgtccgcagcggggatcatgacctcggccacggaaacccgataatccggaatgaacaccaccttgatacggtcagccaccaggggatcgttattgatcttttcggcgacctgattgatcgcataaataatatttttcgccagatagtagcctggggctgccttggcgccgaacaagaacacgcggggcacaatgtcgagcttcggattggcgcgaatctggtgataaagatgaatgatgtgcagcaggttcaggtgctggcgtttgtattcgtgcaggcgtttaatttgcacgtcgaagatggcctctggattaagctcaatcccgacatgatgtttaacgtactcagccagacgcaccttattgtcgtacttgatctgtcgatagcgtttgcagaatttcttgtccttgacgctggcttcaagccctttcaacgcgtctaagtccgtgacccattcagttttcagcgtctcgtcaatcagcgctgaaagttcaggattacactgcttgagccagcgtcttggggtaataccgttggtgacgttgtggaatttctccggccacagctggtgatattccgggaacaggtctttcaccaccagatccgagtgaagtgccgccacgccgttgaccgcgaaaccggccaccacgcagaggtttgccatacggacctgtttatcgtaatgcacagccagtttggcccatactgcctcgtctcccggccagtgttggtcgaccagtttcttaaagttggcatttatctgtttgataatcgcaaagtggcgcggcaacaggctgcgtaccagcctttcatcccaggtttccagcgcctcaggcattaacgtatggttggtgtaggcgaaggtgcggctggtgatgtgccaggcgtcgttccagctcatctggtgttcatcgataagcacgcgcagcatttccgggatgccaatggtcggatgggtatcgttgagctgaatgacctcgtaatccggcagttcgtggatattacggcccaggaaatgatggcggcgtaaaatatcggcgaccgaacaggcacactgaaagtactgctgcatcagcctgaggcgtttaccttcctcatggttatcgttaggatacagcaccttagtcagcttagcagcgtcaatcccctgctgttctgcctgcaggaatttgccgtcattgaatttttcgagatcgaacgggtgaacgtgggtcgcttcccagaggcgcagtggttgagtcacgccatttttatagccgatgaccggcaggtcccaggcttcgccgcgcaggttaaaaccaggcttccagtaagactttccgccttcccctttcactatcttgccgcccacgccgacgtcaaccgcaagcgcgctattgtggcggaaccaaggataatcattgcgatgccagtcgtccggcgcttcatgctgttttccttcgacgaagctctggcgaaacaggccgtactggtaattcaggccataaccaatcgccggttggccgacggaggccatagagtcgagataacaggcggcaagtcgccccaacccgccattgcctaaagcaggatccacctcttcttcgagcagattggtcagattaatatcatattgttcgagcgcttttgcgacctgatcgtaccaacccaggttaatcagattattgccagtcaggcggccgaccagaaactccatcgagatgtagttcacgtggcgcttaaccttactgctgcctttaccgctgtcgggtcgcggcggcagttgctctgctacggcggcgctcacggcgtgccaccactggtgctgggtcatatcctgggctgaagtgagtccgaaagcttgccactggcgagtcaaagccgccaaaaaactgtcctgcttgaaagtcggttttggcataggggaatctctttcctttacgacgagggaggtaatgtgatctctgacacttatatgtataaaccctatacgagaaatttgctcataggttaatcagctaaaactcctgacagcatcatgagttaaggaaatttgagtggctatttgtctgagattttcataatttttcgcatcagcacgggcgatttaacgaaagcccgcacattctgtctggtcttgccggacaaagaattggttacaataggactgaatatttcttaatagacgcatcccgtcatgacgaggcaaaaagcagcatggaacagtttgaagcaatcagcgttgagcaggcccataaccgcctgaaagaagggggtgcagtgatggttgatatccgtgacattcagagctttaacaacgcccacgcacccggcgctttccatttaagtaacgaaagcatcggcgcatttatgcagcaaactgaatccaccacgccggtgatggtgatgtgctatcacggcatcagcagccgcagtgctgcacaatatctgctgacccagggatttgattcggtatatagcgtcgatggtggctttgaagcctggtcgaaaaccttccctcaggacgttgaggtataaggtttttctcgcggaggagcgacgctgaatgggccgctcctctcacccccacgcgctgtggcaaaagggcttctctgctaggtctttatttctgcatcgtgacctgaatcggttttttcacgaataggccgtagctcaacgcgcccaacgtcagtagccccgcgccaaggaagaacacgttagtgaactgccccgtggcgtcgaggatgacgccggtaacaatcggtgcacaggcggccccaagaaatcctccaaaattctggatagccccatcgaagccacctgctctttcggcgcgatgtcggaggccagcgtccagataacgccctgtggcagctgtgagaagaaataacccaccgacagcagcccaatactcagcgcggtgctgtgcacgaacggaaccggcgcaacgaagcaggcagccatggcggcaccgacgacaatgggcactttacgtgccgtaatggtattcacaccgcgacgaattaatcggtctgagatagagccgccgcacagcacgcccaaaatccccgcaaagaacggaattgccgccagccagccggtctgtttcaggctaaagcccagtgatttctcgagatagcccggcagccaggtcagataaacccagatggtaaacatgatagagaagttgccgatcaccatgaaccaggtggttttatgtttgaacaacgccgcccagctcgccctgttgttgccgttagcctcaacgaccgacggctgcactcgttgagcgttggcgtggatcgactgctcttcacgctcggaagggtttcgataaaacttcagccacaccagcagcagcggaatgcccgccaggccgatggcgataaacataccgcgccagccgagagtcagcagcagcacggtgagaatcggtggtgctacggcgtttgcaatctgcgaaccggtgttaatgatcgaggtcggcagcgcacgctctttatccgagaaccagcggtgggttatcttgatgccagaggtaaagaacggcgactcggaaatgcccagcagcacgcgcagcgtataaaacatcgaataaccgttcacaaaaccggccatcactgtaaaggtcgaccacaggccgacgccccacgagaacatttttttcggtccgaaacggtcgaccaaccatcccgcaggcaagtttgccagcgcgtaaggccacaggaaggccgacagcagcaggcccatttcagtctgactaaaaccaaactccctggcgatggtcgtattggcaatactgagattggcacggtcgagataattaatgaccgccgcgataagcagaataaaaataataccccagcgcaagcgtgaaacagccggagccgccttttttaccagaggtacattgagggaagaggtgacgtctttcataattttaattatccactagggttattcataaataagccatcgtcaaacaggctcaggtgaattttaatcacggctttacgaataaaagactcgctataggtatgacaacacgggcgatgtaaatcttgcggaaagaaaacagcaaacatgccaggcactaaacgaatcagcgattcattattcgtttcctgataaaacacaatatcgtgattctcggcacggtcttcgaccacctgatgctgtgccgcaccgcgcgccacgccgatggtttcttcgccctgcaagagaaactggatatcgacaaacttaaagtgtgactcagctcgcatttcattcgcgggaacggtattcatttcctgtaaaagacaaaacatctttcccggaataatgtctattttccctggcgtcagcgttgaaaaatcggtttgagtaataaatttgatacctttattaataatcggatggagagcaaacttttcacgctcccaatcacgcaggcaacatacgatcatgttgaataatccttttatattttttattccgaaagtcgaggcacagaatggcgataaaaattaattcgcctgatgccactttcagtctgggatattcaaaaagcggatgaggtcgatactcatccacacgtcatagcggcttaaacggccgcgatttttttctgccacagcgcggtgccggtgcttatctggtccagcaacacggtgagcccccagaatttctccagcacgttgtctttgtttacccgacagaactcgctatcaaaggtgcccagacgctgatgataaattttggcgtttttcgggtaacccagcgtttctgtcaccgctcctaacgacaggaaaatcgccagctcttcggccagtttcggatgcgcagcggccttgtgatacagccagccgtaaagttccgggtggaagttggtgaacacgccgctaaagcccttcgaacccgccagcatcgccggataggcgatcgccgcattggcattgataatattcagtggcgtctgtgccaccagtttcacgcgacgggtcacggtagacaaatcgcagctcacgtctttaagcaccacaaaacgccccgtgttggcgcagtacgtcagctcttcgtcggtcagcaggcggcgatacggcgccggacactcatacagccccagcggcatggattcgggtaacgcactcagcaactggtcgagcgtggcaaagaaggtctcactgccctgattcttcggatccaggtgattggtcaccagcaccagcgcgtccgcaccggttttcgccatcgcggtcagctcgttaatctgctgttcgatatcgtcactgatatggcccgaagcaatcaccggaatacgccctgccaccttatcgaccacaaatttggccagcgccacgcgctcgtcgagggtcaagaactgcatttcgctcgactgacacacggcaaacagcgcgtcgacacccttctcgagataccagtcgatcaggcggctgaggcccggataatcaatctggttgtctgcgctgaaaggcgtcaacatcaccggcacaatgccctcaatacttttactcatcactactcctcacagtgcccgcaggcatcagacgtaatcgattacgcggacgctaaaaaagttatttaaggcagcgaccgccacaggaaactcaacagtgaacgcagcatttaacgctgcgccaggcgcgctaaaacttgcgcgttatcaggcatgttcgatgcaccttcacgctcgaccgccagtgaggcaaacgcggccgcataggttgccgcctgcaccagactctgcccgttggctaggcttgaggccaacgcgccgttaaaggcatcgcctgcaccggtcgtgtcgacgctcagcgccggaaaagccgggatatgctggaactgatggccgtcgagcaacagggccccgcgtgaccccatagtgatgatcacccgctgtgcaccctgactcacaatccgctgcgccgcctctttggcactcgccagatcctgcacgtcgatacctgaaagctgcgaggcttcggtctcgttgggcgtgataacatcaacgtattcgaggcactcaagcgcatggctggaagaggggcagggttgagtattaccgttactcccagcgctttcgccagcttcatcgcgctcagcgtggcggcaaaattattctcgagctgcaccagcagcacgtcggaatcttcgagttcaggcgcaatagccaccacctcgtcttcgctaatggttttattggcaccggaatagatggcaatcatgttctcgccattctcctgcgagacataaataatggcgttgccagtcggttctgtttccgattgatagagcgtaaaagagtggatttctgaagaggtcaggtgctcataggcaaattgactgaactggtctttacccaccttggaaacgaaatgcaccttggcacccgcacggctggccgccgttgcctggttcgctcctttacccccggtccaagcgtactgcctaacgccagcagggattctccgcccttcggaaaacgttcaacctttgcgacaatatcgacgttgaacgaccccagaatgcagaccttacctttcatgtcctttcctttatgttgctgcacggcctgctttcttttctgaatttgcaggcgtttaagcaacacttcgaagttgccaccggtgtcggtaatcagctttgactgcaaactccggcgaatcaccattgccccaccgtggcagcgctgcaccagcctttcctcagccaatgcgttgagatcgctacgaatggtttcacgggtcaccgaaaataatgacgccaggacctcaacctttacccgctcgtatttatccagataatccagaatttgctgccgacgctcttcaagaaacatagtcatccaccttttctattctcagaataaatgcgctcggccaattaaagagtgatgctgctcataggttgattggcaaaacggaagcaaacaaaaattgcagtttatgatgttgcgtcagacacattgcgccgaatttctctggcatacagcgagggaagctaacgttataatcgatagctcgaagacttggctcaccgcaggtcattgccaggaagcaagataataaatctttaaatcagataattacgggaccagcagaacactatgataagaattatcagcctgtctaacccccgcattgcgcaggcgtttgtcgactacatggcaacacttggggtccagctgcaggtgaaacatgatggacaggaagtccaactctggctggaggatgagtcacagttggaaaaggtcgagcctgagctcaacctttttctgaaagatccgctgcatgcacgctatcaggcggccagctggcacactggcagcacccaggccaacctgcaatatgaacgttactcctactggcagcggatccgcagccaggcgggtccgctgacgatgaccgtgatggttatttgtattttggtctatatccttcagcaaatttacggcgaccagacggtgatggagtggctggcatggcccgccgaccgaagccaatatagtgaactgtggcgctggttcaccccggcattcctgcacttttccatcctgcacatcctgtttaacctgatgtggtggtggtatctcggcgggccggttgaaaaacgcctcggcagcggcaaactgtttactatcgcgctcatctccgcgctgttaagcggttggggacagtccctgttcagcggcatctattttggtggcctctccggcgtagtttatgcattgatgggctacgtctggctgaccggcgagctaaaacctgaacgtcagctctctctgccgcgcggattaatggtgttcgctattgcctggctggcgctgggatactttaatgtgatgggtctggcgattgccaatgcagcccatgtattcggtctggccgtgggacttattatggccttttgcgatacgcgtacgccgcgtaagaaaagcagttaggggatttcggtgaaacaaacacaacgtcatgacgccatcgtcgagttggtccgccagcagagctatgtcagtactgaggagctggtggagcattttgccgtcagcccgcaaactattcgtcgcgatctcaatgatttagccgagcagaacaagattcatcgccatcacggtggggcggcgctgccgtccagttcggtgaatgctgcctataacgaccgcaagatcatgtggtcagatcaaaaggcacgtattgccgcgcgcgcggcgagccatattcccgacgggtctacgctgttcatcgacatcggcaccacgccggaggccgttgcccacgcgctgattaaccatcgtgacctgcgcatcgtgaccaacaacctcaatgttgccaccctgctgacgccgaaagaggacttccgtattctgttggccggcggtgaagtacgcagccgtgacggcggtatcatgggcgaggccacgctcgactttatctcccagttccgcctcgactacggcattttaggcatcagcggcatcgacatggacggttcattgctcgagttcgactaccatgaagcgcgaatcaagcgcgcaatcatcgagaattcgcgcaatgtgatgttggttaccgaccattccaaatttggccgcaacgccatggtcaacctcggtaacatgagccttatcgactcgatgtttaccgaccaaagaccgccagaaagcgtaatggcgctgattaacaagtacgaagtccacctcgaactctgctaatacccgccgggcgatgcctgcttattgcccggcaacctctccccaccttctttctatttcgaccttcgttttccctgaatccctgcccaaccctcctcccaaaacgcgcaataacgaaaaatgaggataaaaagtcatcttctcgtcatccttacccggttaaatcggggtgaaaatgttacctccatcacgcatgaatgtttttatttggttaactcttggcttgtttgttggttatcgattacaatcatgagcgaaaacgagcattaaagagctattacgaacatctggaggaagatgacgtggaaaccaaagacttgatcgtaatcggtggcggtattaacggtaccggtatcgctgcggatgcagctggccgtgggctatccgttctgctgcttgaagcgcaagacttggcctgcgcgacctcttcggccagtactaaattgatccacggtggcctgcgctatctggaacactacgaatttcgtctggtgagcgaagccttggccgaacgtgaagtcctgctgaagctggccccacacattgcgttcccgatgcgcttccgcctgcctcaccagccgcacctgcgtccggcctggatgatccgcatcggtctgttcatgtatgaccatcttggcaaacgtaccagcctgccgggcagtaaagggttaaaatttggccagaattcggtgctgaagcccgaaatcacgcgcggattcgaatattcagactgttgggttgacgacgcccgtctggtggtactcaacgcacaggaagtggaagagcgcggcggcgaagttcgtacccgcactcgcgttacgcgggcatggcgagaaaacggcctgtggatggttgaagcacaagagatagacagcggtaaaacctttaccttccgcgccaaaggcctggttaacgctgccggtccgtgggtgaaaaccttctttgataatgggttgaagctgaaatcaccttacggtattcgtttaatcaaaggcagccacatcgtggtgccgcgcgttcataacgagccgcagtcttatattttgcaaaacgaagacaatcgtatcgccttcgtgatcccgtggatggacgaattctcgatcatcggcaccaccgacgttgaatataagggcgaccctaaaaacgtcaaaatcgatgatagcgagatcgactatctgctgaaaatctacaacgaatatttcaagaaacagctgacgcgtgaagacatcgtctggacttattccggcgtgcgcccactgtgcgatgacgagtcagattcagcgcaaaagatcacccgcgattacacgctagatgtgcacgacgaacagggtcaagcgccgctgctgtctatcttcggcggcaaactgaccacctatcgcaagctcgccgagcacgcgatggagaaactgtcgaagtactatcctgatgccggtccagcgtggaccaaaaacggcctgctgccgggcggtaagattggtgaaagccgagacagctacgaggcagaactgcgtcgtcgccacagctggttgccagaatctttggcacgccgttatacccacacttacggcagccagactgagctgatactcgctggcgcgacagctctggactcgctgggcgaaaacttcgggcatgatttttacgaagcggagctgcgttatctggtcgagaaagagtgggtcgtcgagctcgatgatgccatctggcgtcgcaccaagctcggtatgtggctgacagaacctcagcaggcgcgcgtcgccgagtggttaaaagaacaccgtcaggcgcgtaaagggttgtctctggcttcttaagcctttatcaaacatcctcgtccccgcttttcagcgggggacattttatcccctcaaagcttgaccggtttgatattccaaatcttctcagcgtattcgctaatcgtcctgtccgaagagaaataccccatattggcaatgttaagcagcgcgcgacgtgaccattcgtcctgctgtttgtacagttcatcgaccttatcctgcgtatcgacatagctgcgatagtctgccagcagctgatagtggtcaccgaggttgaccaggctatcaaacaggttgtgatagcgtttcgggtcacccgggctaaacgtaccggtcgcaatctgggttagtaccttgtgcagctcggcatcgttctcatagtattcatgcgggttatagccgttgttacgcagcgcctcgacctccggcgtcgtgttgccaaagataaagatattctcctcacccacgtgttccagcatctcgacgtttgccccgtccagcgtgccgatggtcaatgcaccgttgagcgcaaatttcatgttactggtgccggaggcctcggtccccgccagcgagatctgctcggaaagatccgctgcgggaatgatcatctgcgccagactgacgctatagttgggaataaacaccaccttcaatttgtgatgcgcccgaggatcgttgttgataaccgtggcgacgtcattaatcaggtggattatctgcttcgcggcatagtaggccgacgcagctttaccggcaaaaatcaccgtgcgcggtaccacgttcgcatcgggatcgtcgataatgcggttatagcgggttatcacgtgcagtacgtttagcaactggcgtttgtactcgtgaatacgcttgatctgcacgtcaaacagactgtgcggatcgataaccacctcgagcttttcaccgacgtaagccgccagccgctttttgttttcatacttggctttttgcagcgccttgaggaagctaggatagtcgatgtcctgcttcagctcggccaactggctgagatcggtacgccaggtgtgaccaatcgcatcgtcgagcagcgccgacagcggtttgttggccagccccagccagcgacgcggcgtcacgccgttggtcatgttgcagaatctaccggggtaaattttcgcgaagtcggcaaacagcgactgcaccatcaggtccgagtgcagcgcagacacgccgttgaccttatggctggcaatcaccgccagccacgccatacgcacccggcggccgttggtttcgtcgataatcgaaacccggcttttcatggcattgtcgccgggcaacagttcttcgacgtagttaagaaagtgttcgttaatctcaaagattatttgcaaatgacgcggcagaattttgccgagcatgtccaccggccaggtttccagcgcttcgctcatcagcgtatggttggtgtaggagaagacgcgactcactgtctcccacgcagaaagccaactttttttatgttcgtcaatcagcaggcgcatcagttcgggaatagacagcaccgggtgggtgtcattcaagtggatagagattttatccgcaagattgtcgaaggttttgtgggtgctgtaatggcgattgaggatatcctgcaccgtcgccgagaccaggaaatactcctggcgcagacgcagttcgcggcccgaataggtcgagtcgtcgggatacagtacccgcgacacgttttcagaatggtttttatcttccaccgccgcgaaatagtcgccctgattaaacttaccgaggttgatttcgttactcgcctgcgcgccccagagcctgagcgtgttggtggcatccgtatcgaaaccggggatgacctgatcgtaagcgaccgcaacaacctcttcggtttcgagccagcgggtcttcgagccttcgtgctgcaaacgtccgccgaagcgcaccttgtagcgggtattgtagcgctgaaactcccacggattgccgtattcaagccagtagtccggcgactctctctgctcgccgtcgacgatgttctgggtaaacatgccatattcatagcggatgccgtaaccccgtcccggcagggccagcgtagccagtgagtcaaggaaacaggccgccagtcgccccagaccgccgttgcctaaaccggggtcattttcttcaccaatcaactcctcgagatccagccccatctcgtcaagcgcctgcttgatgtcgtcgtaaatgcccatcgaaagcagcgcgttcgacagggtgcgaccaatgagaaactccatcgacagatagtagacttgccgcacgtcctgcgacagctgtgcgcggttggcgcgcaaccagcgttcgaccatacgatcgcgcaccgcgaacagcgtggcgttcagccagtcgtgctggttggcaacggagggatctttaccaagaataaacatcaatttataggcgatggaatgctttagcgcatcaacgctgacggtaggtgaggtgtagttaatcggtgaagtcatagcatttcgtccccaatctggtgagtggttcaaagccgttgatacagattctgatatgcctgtgcagccactttccaaccaaaatcaatgcccatcgcgtggtgctgcacgtgtcgccaatgcttggggcgactccagagcacaaacgcacgtcgaatggcgttactcaacgatttaccggtactttcctcaaaaacaaatccgctggccgtgccatcggccaggttttccaacgcacagtcgaccaccgtgtccgcaagtccgccggtgcgcctgaccaacggcagcgtgccgtacttcaatccatagagctgcgtcagtccgcaaggctcaaaacggcttgggaccataatgacatcagcaccggcaataatgcggtgcgagaaggcttcgtgataaccgagctgaacgccgacctgcccgggatgttcggctgcggcggccagaaacgcctgttgcagcacggcatcaccggcacccagcaccgcgagctgaccgccctgctcaagcaggtctggcaggccttcgagcaccaggtccaaccctttctgattagtcagtcggctcaccacggcaaacaccagacgcgaatcgtctacgtccagccccatcgcccgctgtaggtaagccttattgacggccttagcgcggaggtcctccgcactgtagcgcgcagagagcaggacgtcggtcctgggttcccaaatcgcctcatctacaccgttgagaatgccggtcagtttaccttcgctctgccgctctagcagcagcgcctccatgccatagccgaacgcaggctgggttatttctttggcataggttgggctgacggtggtcacgtgatcggaataaaatagcccggccttgaggaaggaaatttggccgtagaattcgaggccgtgcatctggaagaactcgggtgggatctgtagctcctgcaaatgctgggcaaagaacaatccctgaaacgccagattatgcacggtgaaaacggtcttcgccggacgcccgcgcgcgacgatataggccgatgtcaggccagcatgccagtcgtgagaatgcaccacctccggcttccagttagggtcaaaaccgcacgccagctcgcacgccatccagctcagcagcccgaaacgcagatgattatcgacgtaggcgtttgaggcctgatcgtgatatggactgccggggcggtcatataattttggtgtatcaataagatagatgcccacgccctgatacagggcatagcgcagctcaacgtgtccggcaaacgtgtccagcgagcctaccagatgagtttccccgatgccttttttgacatcggggaaagcaggaatcaaaacgcgaacatcatctccctcggcaatttgcgcggcggggagcgcaccggcgacgtctgccaggccgccggtttttaacagaggaaacagctcggaacaaacatgtaaaacctgcattctcgctcctgaattttcatcgcgccaaacacgtcgaattgcgcgaaccgaaataagttaaaaattcgatctcttcggcaggctttataacttcgccaacatgctgcgcgttaccagcactatcccgctttccgatcgataaaaacgtttgctgtcttcctctgcattttccccgatgaccatgccttccgggatgtggcaggctctgtctattacgcaacggcgcaggcggcaggaccggccaatattgacatcaggtaatagaatgcttgagtcgatattgcaaaatgaattaatgcgtacacgtggaaaaagcaccgaatgcaccacgaccgaacccgacacaatacagccacccgagaccagtgagttcatggtcatgccgtgactgccggacctgtcctgcacaaatttagcgggcggcagcggctccatgtgggtacgaatcggccagttggtgtcgtacatgtctaactccggcgtcaccgatgccaggtccagattcgcgcgccagtaggcatctattgtgccgacatcgcgccagtatggcggcaactcattgttcgaagtcacgcacgacaaaccgaacggatgcgcccacgccacgccctgacgggtaattttaggaatcagatctttcccgaaatcgtggctggactcttcgctggccatgtcctcttccaatagctggaacaaatagtccgcattgaaaatatagacgcccatgctggccattgccttatcgggttgaccaggaatcgacggcggatccttcggcttctcaataaatgacttgatctggtagtccgggccgatgtccatgacgccgaactcgctggcctccgccaacggcacctcgaggcaggccacggtgcattgcccgcccttctcgacgtggtcgatcagcatgcgggagtagtccattttgtaaatatgatccccggcaagaatcaccacatactcggcacgataacgccgaattatgtccaaattttgatagaccgcatcggcggttcccttataccaatgctcggtgctctgacgctgctgcgccggaagcaggtcaacgaattcattcatctcttcattaaggaacgaccagccgcgctgaatgtgctgcactaacgtgtgcgactgatactgcgtgatcacgccgatccgccggatcccagagttgagacagttcgataatgcgaaatcgataatgcgaaacttaccgccgaaatgaactgcgggtttagcacgagtggcggtcagatcttttaaacgcgatcctctgccccggccaggatcagcgctaccgacttgagaggtaattgcctcgccaacatcatgcggtcattgaattctaatgtagccatagctgaatccttcctgttgccctgctagccttgggtcatcacgcagagcgtttttgccgtcgctcgccaaggcgagccttccctgacgttttgttgttcattgtcaaaaggcgcaacacacagccagcggccctctggtaatgccatttcaacgtcattaagtgatgaattgaccaccagcaaccagcggtcagacaaacgtatttgcaggcactgctgcccgctttgctcccagcttgttgttgtcatcggctgtccggcgccgtcgagccactgcacgtcttccggcattccctgccaccagctgttctgcgtcaacgcaggaatttttttgcgtaaagatataagcgcgcttacgtactcggtgagtcccttgtccccgtcccgccagttgagccaggtcaaggcattgttctgacaatacgcgttgttgttgccctgctgggagtgaccgaactcgtcccccgccagcagcatcggcgtcccctgcgataaaaacagcgtggcgagcagcgctcgctggctgaggcggcgctgctttgcgacctcttccgacacctccagcccctcctgcccgtgattctggctgtagttgttgtcgtgtccgtcgcggttgtcttcgccgttggcctgattgtgtttgtcattaaagctgaccagatcgcgcagattgaacccatcgtgcgcggtaagcatattcacagcggcggaaggcagtcggccatcgtgatcgaaaatatcggcagatgcggcaaaacgggttgcaaaatcgcctatcggcagcgttccatagagccagaatctgcgaatgtcatcgcgccagtggtcgctccattcggcgaaaggcgcaggaaaattgccaacctgatagccatccggtccgatgtcccaaggttcggcaatcagcttgcagtgtcctagtaccggatcggccttgatggccttaaacagcgccgaatcggcgtgaaattcgggtgtacgacccagcatagtgccgagatcgaagcgaaagccgtcgacgtgaaagctctctacccagtagcacaggctttccagcgtccaggcgaccacctcgtcgtcgaccagccgcatagcattgccgcagccagtcaaattgttgtcactgccgtcgtcgttcaaccagtaccagctgcggttatccaggccgcgtagggaaaccgtcggcccttcgacgtccagctcggcggtatggttgaacacgacgtctatcaggacctcaatcccggcctgatgcagcgccctaattgcggtcttgaactcgtgagcggcactgacgccgtttacgccgctggcatagctaggttcaagtgcacagggtgccagtacgttgtaaccccagtaattgctcagccccatgtgttgcaggcgaggttcatcggcatgatgctgcaccggcaacaattccagcgcggtaataccgagacgcttgaaataatccagcatcactggatgcccgagcgccgcgtaggtccacggagagcttcaggaatatccggatgaagctgcgtcaggccgcgaacgtgtgcctcataaatcacggtttcgccccacggaacggccggagcggcgtcatcctgccagtcaaaatgatcgtgggtgaccaccgattttggcaccaggtcggcgctgtcacgcgggtcggcaacctttacaccgccgcacaaccgagggtcatcgccaagaccgccctccagcgcatgagcgctgggatcgagcaataatttctgtgcgttgaaacgcagtcccttagccggatcaaaggggccatgggcgcgaaaaccgtagcgcagacccacctgagcgcccggcaaatagccgtgccacagattgccggtgcgcgacggcaacggcaggcgcgcttccgccccttctcgtcaaacaggcaaagttcaatcttttcagcaccggaggaaaaaacgcaaaaattgacgccatctccatcgaaactggcaccaaacggcgctggcttaccgggctgaagagaggccattagacgtcctcccgccgcaaataaatggtggccagcggtgggatcaccaccgagagcgagtgttcgcggtgatggctggcataaggctcggtgtagacgtatccctgattacccacgttgctgccgcgataatagtgagaatcggtgttcatgatttcgtgatagcggcccggacgactgacaccaatgcgatagccatagcgaggaaccggcgtaaagttactgataacaatcagttcgttaccctgctcatcgcggcgggcgaaggcgaagatcgagttttcgtaatcatccaccaccagccactcgaagccgcgtgggttgaaatccagctcatacagcgccgactgatcgcgataacagaagttaaggtcgcgcaccaaatgctgcacacctttgtgccagccgtaaggctcttcaagcagatgccagtcgagactgtagttaaagtcccactcgcgtccctgagcgaattcgcagcccataaacagcagctttttacccggatgcgcccacataaaaccgtaataggcgcgcaggttagcgaacttctgccaggcgtcacccggcatcttgtcgagcatcgagcccttgccgtgcaccacttcatcgtgagagataggcaggataaagttttcgctgtaggcatacagcacgccaaaggtcagcaggttgtgatgatatttacggtgcaccggatcaagctgcatatagcgcagcgtgtcgttcatccagcccatgttccacttgtaatggaaacccagcccgttggcctctggcggcatcgtcacgcccggatagtcggtagactcttcggcgagcgtcactgcgccgcccagctcacgaccgatggtctggttggtatagcgcaggaacgagatagcctcaaggttctcgcgaccgccgtaatagttcgggatccattgcccctctttgcgactgtagtcgcgataaatcatcgaggcgacggcatcaacgcgcagtccgtcgatgccgtaacgttcaatccagtaaaaaccgttgcccgacaggaagttgcgtacctcgtggcgaccataattataaatcagggtattccagtcctgatggtagccttcgcgcgggtcggcatattcgtacagcgcggtgccgtcaaactgtgccaaaccgtgggagtcgctcgggaaatgccccggcacccaatcgaggatcacgttcagcccggcgtcgtgcaccgcgtcaatgaacgccttgaactcttccggcgaaccgtagcgccgcgtcggcgcgtacatgccgagcggctggtaaccccagctgccgtcaaacgggtgctcgttaatcggcatcagttcaatgtgggtgaaccccatccatttgacgtaggacaccagctcttgggccagctcaccgtagctcagccaatagttgttggcagcatgacgacgccaggagccgaggtgtacctcatagacggaaatgggctggttgaattgattggccttccggcgatcgtcagaaaacgccaccggcgcaggaagttgacgcaccacagaggcggtttcggggcgcatctgcgcctcaaaagcgtaagggtcggcgcgcaggctcaggttgccgcggcagtcgataatttcaaatttataaagctgaccttcgcgaacggcggggataaacagttcccaaataccgttttcacggcgcagacgcatcggatggcgacgtccgtcccaatagttgaaatcacccacgacggaaacgcgggtcgcgttcggtgcccaaacggcaaacatcacaccttcaacgccgtcgagcgtcagcggatgtgcgcctaatttttcataaggccgcaggtgggtgccctcagccagcagccagatatccagctcctcaagcaaaggaccaaaacgataggcgtcatcaataacataacggttgtcgccccagcgcacctccagctggtagctgaaagattttttccggcgggcatcaagcccacaaagaatccacggtcgtcatagcgccgcagttcggcaacgcgactctgcttttgggtgtcgataacccaaacctcgtcggcatccggtaaaagtgcacgcacttccaatcccgcagcgacctcatgcattcctaaaaaggaaaaaggatcggcgtagcgaccggaaaagatttggttaatgacgtgctggtcgggaagtactggcatggtatttcatcctgtgatcaattaatcaacaaatccaagaacaatcattctgtcggcccgatcgttttttcctttagcgtcgcgttttcatccctgaaaagacccatttgccagatttaacccgagaaaaatactccgctcctgactcactactctgcgccgaactagccggcgaagattggctgtactcacatttttaaaaaaagcagataaatgccctactaaatttccaaaatcttctctactaagcatagctaaagctttctgagaacaaggcctgaattaaaagaaatttttcgtaaagatgagaagcgtgggaatggtcaaaaaacagactaaaaggtgacggtaagacaataaaaaagggatgccagcgggcatcccttaacgtttttttgctaaagcagattacagcaggatacgcagcatgcggcgcagcggttcagcggcgccccacagcagctggtcacctacggtaaaggccgacagatactcaggccccatattaagcttacgcagacgacccaccggcgtgttcagcgtaccggttaccgcagcgggcgtcagctcacgcatcgacagctcgcgatcgttcgggatcacgcgaacccagtcgttgtgcgttgccagcatctgttcgatttctggaatcgacacgtcttttttcagcttcagcgtaaacgcctggctgtgacagcgcagcgcaccgatacgaacgcagagaccgtcgacaggaatgacgttggaagtacgcaggattttgttggtctctgcctggcctttccactcttctttggtctggccgttgtccagctgcttgtctatccatgggatcaggccaccggccaaaggtacgccgaagttgtcggttggcagcgtgccgctgcgggtcagctcggtgactttacgctcgatgtcgagaatggccgaagccggattctgcaactcgtgcgccacagaattgtgcagcatgcccatctgggtcaacagttcgcgcatgtggcgagcaccgccgccggaagccgcctggtaagtggcaacagacgcccattcgaccaggtcgttggcaaatagaccgccgagcgacatcagcatcaggctcacggtacagttaccgccaacgaaggttttgacgcctttgtcgatgccttcatggatcacgttcttgttaaccggatccagaataataatcgcgtcgtccttcattcttaaagaagaggcggcgtcgatccaatatccctgccagccgctttcacgcagctttggatagatttcattggtataatctccgccctgacaggtaataatgatgtcgagcgcgctaagtgcgtcgatatcaaaggcgtcctgcagcgtaccctgatgcccaccgaaaaccggtgatggctggccgtgctgcgaggtagagaagaataccgggcgaatggcgtcgaaatcacgttcttctgtcatgcgttgcatgagcacagaaccgaccataccgcgccaaccgatgaaacctacatttttcataatatctgtcctgccgtgagggtgattactgcaaatattgcgcgtttgcaccgttttggcacaattcacccgtcaaaaatggataaaagtgcgatgtactgccctatgagcgcgcgagcctataccttacaaaatgtacgctaagtggcaagtgaatttaatcgataccaggcgctttgttagcagcgctgcttatatataaataaaacctgagggatttgcggttatgactgaaatgatttcggctacggttttgttgtttctgattatggatccgctgggcaacctgccgattttcatgtccgtgctcaagcatctggatcccaaacgacgccgcgtggtgttgatccgagaaatgttgatcgccttgatcctgatgctaattttcctttacgcgggcgagaagatcctttcgttcctgaatctgcgtaccgaaaccgtctcgatttccggcggtattatcctgttcttaatcgctatcaagatgattttcccgtcgcatgaaaataacagcagtgggcttcccgcgggcgaagagccgtttttagtgccgctagctattccgctggttgcgggcccttccattctggcaacgctgatgctgctttcacaccagtatcctaaccagattggccacctcacgctggcgctgttcatcgcctggggtatctcgatgggtattctgctgctgtccaacctgttcctgcgcctgttgggcgacagaggggtcagcgcgcttgaacgcctgatgggattagtgctggtcatgctctcgacgcagatgttcctggacggcgtgcgggcctatttgaagatttagaacggtgctccgcagggagcaccgtacattaggctaaataaaataccgacttaagctcctgactcaccgggctgttgtccgcattcgacggcatcagctcgcacatcgactgccaccaacgttgacacacctcggtgctggccaccgcgtcccaccgcgcctgcgactcaatttccaccaccgcgaacagcaaattacgttccgcgtccaaaaaaatactgtaatggtgggcgccatgcgccttgagcgtctgctccagttcaggccaaatcggcgagtgtcggcgctgatattcggcgtgagcgtcaggatatacctgcatcacgaaggctttacgcaacattgcgtttgtccagatgcaatgcctcctgccacggattaacgccgaaacgcttgccgagggcgatgagctcctgcgtggtaatcgtctgcttcatgccgcccatcgagataaccttcaccagcacttccgaagatttttcggcagtgtcgatcaatccaaaggtctcgtccagcgtcgggcctgcgccgaaaataccgtggaacggccacagcacaatgctgtgcgacttcatctgctcggcggtcttctcgccaatgccgtcggtgccaggcaccatccacggcacaatccccacgccgtccgggaacacgaccagacactcggtgctgccttcccaaagctggcgcgtaaagctcgccgcgtccagctccagcacgtagctcagcgccataaagttcgtcgcgtgacagtgcatgatcacgcggtcggtgccgttggttagctgtttacgcacgctgtgcgactggaaatgcgacgccagctcggaggttggcacaccgccgttcaccagtccccaatggattttataagacttgccgtcttcgctgacctgaagcagcaccaggctgtctgcggggtcaagctgcacattgcggaaaaattttccggagccggtcaccaggaaccagcagttagccaacagtggcgcgggttggcttagctcgatatggcgcggtgcggccacaaaatcggacttgaatggcgcgacctcgtcctccagcaggcgcaggctgatgttgccgccgttgcgctcgtcccagcccttcagccacatgtcgctagttgccttcaccattccctgcacaaaccaagaggaaagaatgctttgcatgataaatccttaacgttgactgagtatttgttgttcataacggcgcacgtcggtaatccaaccggcatcggcgggcacgtcattgcgcaggcagtaggtttcccacactgcctgccacggcagcgatttctgctcctcgagcagcgccagacgcagcgtatagtcgccctcattttcggccttgcgcagctgatcgagtggctccagcagggcacgcagcagcgctttcttggcgttgcgggtgccgataacccaggcggcgatacggttgatggaggcgtcgaagaagtcgaggccgatgtggactttgtcgaagagatcgttgcgcacgatttcgttggcgatggcctgcgtttcatcgtcgagaatgaccacgtggtcactgtcccagcgcacagggcggcttacgtgcagcagcaggcgcggcacgtacagcatggcggtcgaaattttgtcggaaatcacttcggtcggatggaagtgaccggcatccagcgtcagtgcggtttggcgactggtggcatagccgaggaaaaattcgttggatcccacggtgtagctctctgcgccaatgccgaacagcttgctctcgaccgcgtcaatgtggtgctgcggattcagcttctcgctgatgatttcatccagtgcggtcatcagacgctggcgcggcccgaagcggtcgacggtcaggtctttcatgccatctggcacccaaatattcatcaccgacggtgtgccaagctgctcgccgaatgacgcagacaccttgcggcttgcctgacagtgttcaatccagaactggcgagtctcagaattggcgctagagagcgtaaagccgtcggcgctcagtggatgcgagaagcaggttgggttgaagtccaggccaaggcgattctttttggcccagtcgacccagttgctgaaatgcttgggttcaatctcgttacgctcgaccgggctgtcgctttcaagataaatcgcgtgcagattcaggcgttttggacccgggatcagcgagagggctttatccaagtcggcgcgcagctccacggcagtggtcgcacggcccgggtagttgccggttgcctgaataccgccggtcaacgcgccctgagggttttcaaagccgcgcacatcatcgccctgccagcagtgcatggagacaggcagttgatcgagtttggccagtgcggcctcaacgtctacacccacggcggcaaaacgctgtttcgcaaggtcaaacgcctgatcgataagcttggtcataagcaaaattccttattaggttggctcagcgcctgaaaacgtggccaactggccgcgattgcgctattggaatgaggttcaatgcgatgtaacgggaaatgttctgccacccgctggcgaaacgcgccgacgtctttgatgtcacccagcgcaatcagctgacagccgatgttgccgagcgtcgacgcctcaatcggtccggcaatgaccggcacattgcaggcattggcgcacagctggttgaggaaatggttctgacagcccccccgacaatatgtagctgcgtgaagggtttaccgcgcacgttgcccagttcttcgagcacctggcggtacagcagcgccaggctgtcgaaaatacagcgcgcaagttcggcgggctgtgtggctgcggcatggcgttttcgacgcaggcgtcctgaatctcacgcaccatgctggctgggttgataaaacgatcgtcgttgggattgataagccaccggcaggcggtctgacgcgccgcatcgtcaatcagcgcgcacaggtcatcgatgtgcagctcctcgcagacgcgctgtagcagccaaagccccataatatttttcagcacccgataacgcccttcaacgccgccttcgttagtgatattggcctccaacgcggcgcggctgttgtacggcgtctgactttcgaagcccataagcgaccaggtgcccgagctgagataggcggcatcggcgtgggcaagcggcgtacccagcacggcgctggcagtgtcgtgcgttgcgacggcgataaccggaacacccttgccgcgcgggcttttccattcgcctactgtgtggccgggctgggaaggacggccaaaccacgcggccttggcgcctgcccagtgcagcagcttgctgtcccactcgccgctctcgatatttagcatctgcgtcgtggtcgcgttggtgtattcccagcacagcgcgccggtgaggcgatagtgcagataatcggggatttgcagcacgtgagcgatgcgctcggttagctccggctgggcctgcgtcagcgcccgcatttggtaaaggctgttaaacggcaggaactgaatgccggtctgtttataaatcgcctcgcaggtcagctcacgctgcgccttcgccatcacaccgtgagtgcgcttatcgcgataagagacagcgggtgccagacgttggccgtcggcatccagcagcacaaaatcgacgccccaggtatcaatgccgaggctgtccaacgcaataccttcatcgtccagctgctgtaaaccggcgctaatggcctgctccagcgcgtcaacatcccagcattcatgttcatcgatttgcaccagatgattggagaaacggctgacttcccgcagggtcagcgtgccctgttggaggtcggaaagggccagcataatgcggccgctggaagcaccgaggtcgatagcgacaatatgacgaatggtcattggatttcagtccctgctgattcaatgcctacagtctaaaatcactgaaattcgccgccttttcgttactgccagcgccaaacgcttgctggcaattgcgcaaagatgagcttgaaccagctcacacttttttcttttgccgtttgtcctgcaagctgtgaccgccgccgcatttctgaatcaattttgggtcattcttaaaaaatccgtcccccaaaaggatttcgcggtcaaaaattcaaggtaaagttgtggcgggattactaccatcggttaagaatttattaatgaggtgttaaaaatgaccgtgttacacagcgttgattttttccccgccggtggtttctccattgccgttgagccccgcgcgccgcagggcgcctttcccgagcatcatcatgattttcatgaaatcgttctggtagaacaaggcagcggtattcacgtgctcaacggccagccacagacgctgtgcggaggctgcgtgtgctttattcgcgatcacgaccgtcatctgtatgaacaaaccgacaatctgcatctgactaacgtgctctatcgtggccccgacgcattccgttttctctccggcctgcgcgatctgctgccacaggaaaaagacggcaactatgctgccctctggcgcatcaataacaaggtaatggcgcaggccaaagcgctgattgatcaactgccgcgcagcgcgacgcagttttcactcgagcagcaggccgagcaggagctacgctttatgcagctgctggtgctgctacgccagggccgcaacacgcaggaggacaacggtcaggagagccgactgcgccacctgctagactggctaaacgaacactacagcgaggagattgactgggacgaactggcaaaccaattctcgctgtcgctgcgtacgctgcatcgtcagctaaagcagcaaaccggcagcacgccacagcgctacctgaatcgcctcagactcctacagtcaagacacctgctgcgccatagcgatatgcgcgtcaccgatatcgcatttcactgcggtttcggcgacagtaaccacttttcgacgctttttaagcgcgaatttggttatgccccgcgcaacgttcgccagcatatgaattaactcagaggccctatgacacttctcctgcccaaagccgactatctccctcagacttgatgccggtggcggtcgccgatcgggcgcctcagccctcgtttcccgcgcacacgcacgagttttgcgagattgtgattgtctggcgcggtaacgggctgcatgtgctcaacgacaggccatggctggtcacgtgcggggatattttttatattcgcgacaccgactgtcacagctacgatgcggttaactgtctggtactcgacaatattatttactgcccagaacgtttcaaactcgggctggactggtcagaaatgttgccgcgtgatgaggaggacagcccgacccattggcgactgacgacgcgcggtatggcgctggcgagaggggtgattttgcagctggtgcaggaaagcagaaagaccgacgtgctgtcgttgcagttaaccgaggcgctttttttacagctggcgctggtgctgcgacgccatcgttacgccgctgacagggcctacgccctgccggagggagaacagctggatctgctgatgtcggcgattcaggtcgacgtaggcacccctttttgcctgacgacattttgtcatcaacatcaactggccgaacgcggattgaagcagctttttcgtcagcaaaccggcatgagcattggacactatcttcgtcagcttcagctgtgtcaggcgaaacatctgcttcgcagcagcgatcgcctgattggtgaggtcgccgcccgctgcggctttgacgacagtaattatttctcggtggtgtttacgcgggagaccggcatgaccccagcgcctggcgtcagcagtttaggacgccattccaagaccgacaatattcgctgccatcacgataaccaaacagccaatgctcagcacgccgaccggacgctgacccacatttttccactctttcatgataagtccgaccaacccgccgcatagcacgtagaagctcatgtgcaacatccagctgatgaaatcgtactgcgcaggaatttgtgcgtggccccaggcgtagaagaagaactgcagataccacatggtgccaccgagcagggcaaacagcacgtttgccaccagcagcggtttcgcaaccgagaagtccgctttcaccgacagctctttcttggtcgccagacggatgaaacagtaggccagattgacgatggcaccgccacccataatcaccacatagcttggcaacgcgacgtacagcggattaatgcccaacgccgcggcggcctcatgcatcggttttgccgcgtccatcgcaaaagacatgccggcagagaaaatcccgcacatcaccgccagcagcaggcctttcttcaggttaaattcctgcgccgtgacgcccatcgcccgctctttcaacaaaccggcacgagagacaatcgcgacacctaccacggcgaccagcacgccgagcagcgtcagtcgtccccctcagagctgaacagttcgacgaagcggccttgcagcagcggggtcatcagcgtaccgaccaccagcgtgacgccgatggcgataccaattcccatcgacatgccgagatagcgcatggtcaaaccgtaattaatgttaccgacgccccacattgccccgaacaaaaacaccggcaacagcgtagagaaactaaacgagccgtagtagctccagaagttcggcagcagaatggcactgacgacccacggcaggataagccatgacatcacaccaccgaccgaccacatggtttcccacgaccagtgacgcactttcttaaatggggcatagaaacaagccgcactggtggcgccgataaagtgccacatgatgcctaacaggattgcgttattcatttttattaattccttcgtagagttgaggcgaacaggaaataagcggcttcctgcatacgaaggagtctaaggagttgtcaccgcaaacaacctctgtatggttgcccacccagcggtttttctggctaaatcgaggagatttcaccgaccgcgatcacaaatttcttttctgcccttaatcggccctttttgcctaaatcacccaccaaccctgctatcactggcttaattgcaaatttgccgggtggatccggccagtacgctcatttttgccaacctgcccgtttctgtggcaatggcgaaaaggtgatgccgggaaaactgcgtcacgcttgaataatgaaacaattttaacccacttaattaacaaataagtttcattaacaaacttatgtgacacatcactcgatcccagcgataacggagaatctgcaaatgaccattgttcaacaacgcatgtatatcgacggacagtttgttgaaaaccaaagtgataaatggatagacgtcatcaacccggcgaccgagcaggttatctcgcaggttcctgaaggcaccacggccgatgccaaacgcgccatcgatgcggcgcaggccgcgcaggacggttgggaggctctaccagcggttgaacgcggggtttggctgcataaaattgccgctggcattcgtaagcgcgaagccgagctgaccaacaccattatcgcggagggcggcaagacgcgcgggctagcgcagaccgaggtgctgtttaccgccgactatctcgactacgtggcagaatgggcgcgtcgctatgagggcgaaatcgtgcagagcgatcgtccgaatgaaaatattctggtgttcaaaaaggctatcggcgtcaccacgggtattctgccgtggaacttcccattcttcctgattgcacgcaaggcggcacccgcacttttgaccggcaataccatcgtcatcaaacccagtgaactgacgccgaataacgcgattatcttcgccgaaatcgttgacgagattggcctgccgaaaggcgtcttcaatctggtgacgggctatggtcccgtggtcgggcatgagctggccgccaacccaaaagtcggcatggtcagcctgaccggcagcgtcaacgccggtattcagaccatgattgccgccgcacagaacgtgaccaaagtttcgctagaactcggcggcaaggctccggccatcgtgatgaacgacgccgacctggatttggcggtcaaggccatcgtcagctcacgcgtgatcaatactgggcaagtctgtaactgcgcagaacgtctttacgtgcaggaaggcgtttatgacgaattcatgacccgactgagcaaggcgtttgagcaagtcaaatttggcgataccgcggataacagcgacctcgatatgggcccactgatcagcgccgatgccttgaaacgcgtggaagaaaaggtcgcagccgcggtgcaacagggcgcgaaagtgctgcttggcggtaagcgcgcgggcgacaagggtttcttcttccagccgaccatcctcaccaacgtcactcagaagatggacatcatgcagcacgagatttttggcccggtactgccggtcaccaccttcaagacgctggacgaggttatcgcgttggccaacgacagcgaatatggcctgacctcggcgatttatacccagaacatcaacaccgcgatgaccgcgctgaagaaactcaagtttggtgaaacctacgtgaaccgcgagaacttcgaggcgatgcagggcttccatgcgggctggcgcaagtcggggatcggtggagcggatggacgtcacgggctggaggaatatctgcaaacccacgtcgcttatctgcagtatcaagggtaacggactgacagcgggggcgttttcagaatcttgagtgattgcgaaataacgtcgtcagaccctatgatgacgacggcggacagattttccgcatcaggcgcgaaggcattgcgccacccatgattgatagcaaaccacaaggaatcagcaatgaagacccccgctctgcttgccgcgctagtggcgctgacgcttaccggatgtgcagccacgcaccctgcgcctcaggctcccttcccgccgaaggcggtagaggcgccgaccccgcagccagcgccgccgattgtctgcaaaaccggtaacctgatgactcagaccacactgtacttcgggctgagccgccacaacgctgcgccggtaagcgccgcccagtggcagtccttcgtggataaagacgtgacaccgcgctttaaagacggcctgagtgtgtttgacgcgaaagggcaatggctgagaagtgaaggcgttgtcatcaaggaaaacagcaaggcgttgatgctgattcatgctgccgacccgcaggagcagaaaaaaatcagcgagatacgcgatatctataaacaacgcttcaagcaggactcggttatgcaggtcgataacccggcgtgcgtggatttttgataaaaaaacccggcaacaggccgggttctttttttaaaatctggaagcttaaagcaccagaccggcgaatgccgcagaaagcagactgaccagggttgagccatacaccagcttcagcgcgtaacgcgataccacattgccctgattttcgttcaggcctttaatcgctccggccacgatgccgatagacgcaaagttggcgaacgagaccaggaacaccgacagaatgcccaatccacgcggcgaaagctccaccgcaatcttcttcaggtcaatcatcgccacaaactcgttggtcaccagcttggtcgccatgatgctggcagatttcagcgcatcaggccccggaatgccaatcaaccacgcaaacgggtagaacacgtaacccagaatctgctggaagctgatcccaaagatagcggtaaacagcgcattcacggccgcaatgatggcgataaaaccaatcagcatcgccatgataatcaccgcgaccttgaagccagccagaatatactcgcccagcatttcaaagaagctctggtcttcatgcagcttgtcgagcttgatttccggctcgtcacccggcggtgtcgggttaataatcgacaggataataaaggtgctgaacatgttcagaatcagcgccgcgaccacgtactttggctcaatcatcgtcatataggcaccgacgatagacaaagacacggtcgacatcgccgcagccgccatcgagtaaagtcgacgcggggagatatccgccagcacccctttataggcgataaagttttccgattggccgaggataagcgtgctaaccgcgttgaaagactctaactttcccatgccgttcactttcgacagcaaagtcccgacaatacggatcagcagcggcaaaatgcgcaagtgctgcataatgccgattaacgctgaaataaagataatcggacacagcacaccgaggaagatgaaagccagacccgccttgctcattccgccaaagacaaagtctgaaccctgggccgcataggtcagcaggttttcaaagaatcctgaaacggcagtcactatcgccagaccactgctggcatgcaggaagaaccacgccagcaaggcttcaatcaccaccagctggaggatcacgcgcgggcgaattttcttgcgatcgttactgaaaatgaacgccataaagaagatgactacgagagccagtataaagtgcaacactgagggcatgggggagtgtccggcagcaaaaattatttggccggtattgagccacaattttgggcggctttcactcttcttgagtatttatttacgcaatcaggcgagcaggttcctgccaccgtgcggcgcaggaacctgatgagtcgagaaacgtggcagaatatattagacgatgtgagacaacgccaggcaaccgaccaaaccacagacagaaataatggtttccagaacggaccaagatttcatggtctcgccaatggtcagattgaaatactctttaaacagccagaaacccgggtcgttgacgtgagagaaaatcacactgcctgaaccgacggcgataaccatcagctccgggctggcaccggtggtcgcgataagcggtgccgcgataccgccggcggtgatggcagccacagtcgccgaacccagcgcgatacgcaacacggccgcgatagtccaggccagcaggattggagaaagcgtgctgccctgcatgagagcggcgatatatttatcaacgccgctgtctaccagtacctgtttgaacgcgccgccaccgccgatgatcaacagcatcatggcgataatcttgattgagtcggtgatggtcccatcacttcatccattttacgtccacggttcagaccaaaggtgaagatagcaatcagcacggcgataagcgtcgccatcaccgggtcaccaaagaactcggcgtaggagagaatcgggtggcctttcggcacaatcatttcggtaatggcgcggaaggccatcaggataaccggcaccagagaggtcgcaacgctcacgccgaaaccaggcatctcttcttcggtaaaggttttcgggttgaacaggccctgaggaaccggcttatcaatgcctttcaggaaacgcgcatagaccggaccggccagaatcacggtcggcacgcctagaatcgcgccatacagcagcgtcttgcccatgtcagcatggaaaatggtcgcgatagcggttgggcccggatgcggaggcaggaagccgtgcgtcacggacagcgcagccgccatcggtacgccaacgtaaagcaggggtaaacgcgcagaggccgcaacggagaacaccaacggcagcatcagcacaaagcccacttcgtagaacagcgcgaagccgacgatgaaaccggtcaccaccagcgcccactgaatatatttcacaccaaacttatcgataagcgtggtggcaatacgctgtgcaccgccgcagtcagccagcagttttcccagcattgcgccaaagcccatgattaacgccaggctgccgagcgtgccgcccacgccatttttaatcgaggtaatgactttgtctactggcattccctgcatcacgccgacagccagcgcgacgagaatcaatgcgataaaaccgtttagtttgaatcggatcataagcaacagcagtatggcaacgccaactgcaacaatgactaatggcataactttccccttccgccttttcctgtttgctaaaccttatagaacctctgtgacaggctggtttatgcagcgcagataaaagtacacgagtgatatttttttgtaagtttgcgaattcagctcaggcctgtttttgcaggtagcgctaaaattgataatggttcctttgtgatattagtcacacctccatttgttaccggtatcatgataccggtaacatgctaatataaggaatcacccgctcgggtaaattctaaatatgggacggagatcaaacttatggcagggcaaagcatcattttgatgggtgtgtctggcagcggtaaaacaaccgtaggcgcagccgtagcaagagcgattaatgcaaaattcattgacggtgacgatcttcacccccgcgccaatattcagaaaatggccagcggacagccgctaaacgatgacgatcgcgccccgtggctcgaacgcttgagcgatgcggcttacagcctaaagcacaagaacgaaaccggcatcatcgtctgttcggcgctgaaacgtcgctatcgcgatgcgctgcgtaaaggcaacgacggcatgattttcctgtatctgaagggcagcgaagaggtcattttgcagcgtcttaaagcgcgtgccggtcacttcttctcgccggatatgctgaaaagccagttcgcggccctcgaagaaccgggcgaagatgaaacggacgtcgtacgcgtgaacattgatcatcagattgaaggtgtggtgaaacgctgcgtaacggccctggaaaacgccaaggtgaaggtagaagcctgacctcccctgccgcgtgaagcgttgaccttctggtctgttcgtccccgcagtgcggcagtttaaatactgccgcccgccgagatggtgaaaccgacgtcaaccatcgtcggaacaacctcttcgccacgcagccgcgcgagcagacgctcagcggtgatttgccccatgcgctcacgtggtgtcagcacgctggccagcttcggctccatcgcctgacccatgttgtgcccgtggaaaccggcgatcgccatctgtgatggaatgtgcagcccctgccgctggcattcgaaaaaggcacccgccgcaaggtcatcgttggtgcagaaaatactgtctatctgcggataatcaagctgcgcctgacgaagcagttcggcaccggccgtgtagcttgatgaacgactggtcatcacactgtaaggctgaagcccggactcacgcattgcctgctcgtatccccgctgcttgattaaggttcgctcatcctgacgcgcaccgaaatacaccacgtgacgatggccgtgggcaataatctgctgggtcatctggcgtgccgcttcaaagttgttaaaccccacggctaaatcgacgcacggcgaaatgcagtccatcatctcgaccaccggaatacccgccacctcaatcatcttcagcgtgcgcggcgagtgattgcgttcagagaggatgagtccgtcaatgttataggaaagcaatgaggtcaggcgttgttcttcgcgttcggcgctgtagccgtagtgggcaagcatcgtctgatagccatgaatatcggtcacgctttcaataccgcgcaggacttcggcaaagacctggttggtcagggacggcagcagcacgccaatggcacggcttttggcgttggaaagaatgtcaggggcacggttcgggatgtagcccaattcgtccagcgcagcggcgattttctcttgcagcagcagagaaacctgttcggggttgcgcaaataacggctgaccgtcattttggtgacaccaaccctgtcggcgacgtcctgaagcactggcctttttttcttcattttcaacgaactggcagtaagggaacaagcgtgaattttagcaaaaaatggcgggatttggcacaaaaacagcaatcccttcccacacgtaggtgaaggaagggaccgatttagaccggcggcaggtcaaacagcaggatttcactgtctgcgtcggcgtgtaggcttaacgcggtttcgtcccagatggctaatgcatcgctggttttcaccgcctgaccgttcactgtcagactgcctttcactacctgaatccagatacgacgatctgccgctatggcgtactcgccgtcttcaccctgcttgaaggcccagcgggaaagctccatgtcctggaagactttcagcgagccgtcgcgcgcgtccggtgacagcaccagctggcgaccctgcggcgcgtcaaacatgcgctgctcgtagcgcggctccaggcctttggtatcgggaataatccagatctgataaaggtgcaacggacgatcggtgttgccgttgtattcagaatgcttcacgccggtcccggcgctcataatctgaaactcacccgcctgaatctgctctttatttcccatgctgtctttatgctcgaccgtgccggacagaacataggtcaggatttccatatctttatgcggatgggtaccaaaaccctgtcccgcatcgatcacgtcttcattgataacccgcagcgcggagaagcccataaaattgggatcgtaataatcagcgaaagagaatgtgtgccagctatccagccagccgtgcgtcgcgtggccgcgatcctgagctttacgtaagtagatcatagtcaactctcctcaatgttttctctagtctagctactggctcacaataagaaagcgtaaaaacttaacccctctactcaaaaaaattgaataagtttagggcgataaaaacaaaggatttgttggaaaccggcgagagaggaacaggaggcaaaaaaaaagccagcacccggctggctaagaaatactggaagcaatgtgagcaatgtcgtgcctcccagggacccgtttggctatggtgaatagccatccccggaacgcatggcaataataatcattatcattcgcacttgtaaagctttttttttcatcaatttttaaattgactataaaatataggcagataaattaagaggttattattcaagccatgcagggagccattatgagtcagattgaaattcgtcatgtagaacctgaagattctcttcagcttcatcagcttttttgccatgaagaggtgtatagcgacacactccagctcccgcatccggccacaagcctatggcaaaaacgcacgacggaagaacgacctggcacttatcgactggtggcctgctttggcgagcgcgtgatcgggcaaatcaccctgcacgttgaacagtcaatgcgtcgccgccacgtcgccggtttcggtatggccgtacatcccgaatttcaggggcaaggcgtgggcagtcagctgctggcggcagtcctggatctctgcgacaactggctgaacattacgcgcgtcgagttgacggtgtttgtcgataatccatccgccattgcgctatacaagaagtttggtttcggggtggagggcacctcacccgcctttgcgatgcgcaacggcaagctggttgatgcccatcacatgggaagagtcaaagcctgataatgcccgttccgccgcctcggcgggaagggcaaaatttactctgtgacccacgatttttcttttttcacccgtctcagcaccagcgccgcactcaggcaaaccgcaaaggccgacgccagatagatagaggacacgcccgcgtgagtcattaatattcccgccagcgggccggttatccccagcgacaaatccataaatgccgtgtaggtcgccagcgcactgccctgattctgctgcggtaatcgcttgaccgccaccacgcccaacgctggaaataccagcgagaacccagcccctgtcagcatcgcacccaatagcgccatcaaaggcgcggcggcgcaccacaccaacaacagccccagcgtttcaaagcagaagcagaccattgccacgcgctggccaccaaaacggttgatgctgtttggaaacagcaaacgcatgccgacaaacgcggtgctgaacaacgtcagggcaaatgcgccgccgctccagcctttggcggcatagaacagcgtaataaaggtcgctattacgccaaaccccgtcgaggccaatccgagtaccaggccataaggcagaacttttcccagaacctgacggaaagggataaccgtgcttgtccccttggcaacgtcgggcttggtcatcgccagcagcagtgcggccagcgcaataccgataatgcacagtgagagcgacgcaagaccgccgagatgcacaatccataccccaagcggcgcgccaatggccatcgcaccataggtgacaactcagctccaggaaatcaccttgccaatatgcagggagccgacgcggccgattccccacagcgttgaaccggttccggcaaaactttgcccgacgccgagcaccagacggcccacacagagcagtgccaggcttattgccggtgaagcgccgaatgcaacggcacccaggtagaataccccgctgagcaggcagccgaagaggccaatcagtaccaccttttttggcccgagcacatcggcatagcggccagcatggggtcgactgatcagggtggcgaagtattgcatactgatagccaccccagcccaaaaggcgctaaagcccagactgtcgtgaacgtaacccggtagaacggccaacggcagaccaatcgtcaaatagttggcgaagttgaagatcatgatggccagaatctgcacattaatattaaccggccgtgacggttttgatgcgtgaggcgacattaaaattaagagtctcaataggctacaagaaaatttggcagtcatataactgacaaaaccctaatagggactttattagttatgaattatttaagcaatcactcacaggtaacgaaattttcactataaatatcaatgcattacacaaaaaaatctcttaacggtcttccatcccttaaatactgaaaatttctgataagagatcactttcttttacctccgcctattccaccgattaaatttaaatcatgattttttaaatttaatgttttgattattttattatcaacgctgaattaatatcatttaaataaccagaccttattattttattcatttaaacaatcaaagttatattattgagcgacatcacaaagaaaccatttagttcaaaaaatgattttttatcgttcaattttatcggtaccgtaaggaaccttttgggaaataagtaaaagacaactcaaattcaatatatattaaaataaggatgataatataatgatgcgtaaatcattggcagtgctcatttccgcgctcgttgccagctcctcagtaaatgccgcagaaatttataacaaagattcaaataaattagatttatacgggaaagtggttggcctgaactatatttcaagtaattcaaatgagcatggcgataaaacctatgctcgctttggattcaagggaaccacggagataagccagcagctgagcggatacggtcagtgggaatacaatattaaaaccaacacgcctgaagaaagctcagcagccaatgcagcgacccgcctcgcctttgccggcctaaaattcgccgacttcggcagcttcgactacggtcgcaacttcggcgtactttatgacgttgaggcctggaccgaccttaacccggaatttggtggcgatacctggtcaagaaccgacaactttatgtccggcagatccaatagccttgctacgctgcgcaccaaagacctctttggcagcgttaataacctgaatttcgccttgcagtaccaaggtaaaaatgaagtggccaacaagccgctcacctctaacggcgaaggttggggcatgtcttcgtcttacgagctcggtaatggggtaagtttggcagcggcttttgcacagtctaaccgcactgaagcgcaaaaagcagataacaacggcaacagcgctgaggcctggaccgcaggcattaaatataacgccaatcagctttatcttgccgccatgtatgctgaaagcaaaaacatgacgccttatggcaaaacaagcgttgcaccaaaaaccaaaaatattgaattagtcgcgcaatacctatttgtcggtggcgcagcagacggcctgcgtccttcgatttcatatttgcaatcgaccggtcagggtgtgcagacaacactggcagcggatgaggccagcagcgttcaaacgggtaaccatgcgctagtaaaatatattgaagtaggcacctcctacaacttcaataaaaacatgtacacctacgttgattataaaattaacatgctgaataaagacgagtttacgacccgcaatggtatcaataccgataacgtattgggcctgggtctggtttatcaattctaaataataacaagagcgttaatgcgttgattcagttctttataccgaatctcattcactccggattcggtatttttttgacaaaaaaatagtcgatttcaaagaaagcgactattttgaatacgattattctgacatctcactaagtcgggtctttaatgaagactccatttttttgaattctaacgcgtactcgtaaaaaatttcaccggcctgtgtcaggctaaaagggcgggttcttaccaacagcttttcgcccattgtcttttcaagtgaactcacgcggatggacagcgcggaagtggtgatgttcaaaatcttggccgctttatcaaaattcccattatcaatgatagccaaaaacccgttgatactcttaggttctaaaaacatgttaactccttgttagccttttaggattgagatcatttacaatgactctacctagtttaattgtttgtaatacgacatagagggatcatataaagacatgttatatcgataattcacggaaaataattctgatcacagtaaatcactgatctcttggtattaactcaacaacacgataacaatatttttatcactctccttcagaaggtgaagaaattgccacaacccatcgtaaaacaataccaaaattcgcttaaaattcttaaaacgaataggctacataacttagttattctcttataattaattaaaaccctcataagaggtaagatctatcacattgtaatataagagaataataattttaatcactcttaatattaacaaaaagcaggatttacggcgtcaaaaaatcctgagcaagaaaactcactcaggatttaaatgatgaacgggaaatagttagcaagctattttctctatcttttcacgcaggctgttttcgagatctcgcagttgaaccgcgtggcggtagaagatatttccagtctcggtgaggacgaacggtcgtttgcgtatcagcagctttccgccaattattcgctctagcgtactgactctgattgagagtgcggaagtggtaatgcccagtttcttcgccgctttttcgaaattaccgttctcgacaatggcaaggaaacctttaacgccttttggctccataatcataaataatccttttactcgtcattccttggggtaaaatcctataagaattacgaaattatatagatcagcaatcattgatggataaatataataggtcaacgttcgctattcattataagattattgaactcattgaaaatgatattcgtactattagtacagtgaaataatacttcagtttcgtgtaatgcaatatatataggacagcaacaaaggataatatttaaattaatatcctggaaataagtttatctgcgagtcgagtctcatcctgacaaaaaaatccgttgcgataaatagacaataagtctactgtggacaatatttccacataatgagactgccatgtctattactactgaaatcactccccttcccggtatggcaccggggacacagcatcagcttaccattcacaaattcagcggcggccaaagcggtcgcagtgcctatattcaggcaggcgttcacgccgatgaacatccgggtctgctggttatccaacatcttcttgagcgattgcaggaaatagagcaagccggcgacctcttgggtgaagtcgctgtttgtccttttgcgaacccggtcggcctcggacagaacatctttggctatgtgacaggccgttttaatctggccaacggtgaaaactttaatcgcaacttcccggatattacgcccgccgttgaggcgatgatcgctgaaggtgcagccagcccactttcttctgcagacattaaacgccgatttgccgaggctattgacgccattccggcgcacgacacggtagcgaccaataaaaaactgctgctcaaagaggccttgcgccacgatatcgtgctggacctgcactgtgatacctctgccaccctgcatctttatgcaacgcttcatcagcaggagcgcgccgtgctgctggccggatgtatgggaattgaaaccgtattcctcgaagagcaggccggtggacagccgtttgacgaagccttcggtaaaccgtggaaaaagctgacccaggccggtctcgccaatccgctggactgcggcttttcaaccagcgtcgagctgcggggtcaggctgacgtcaacgatgaaatggcgcgcgctgatgccgaaggtattttgcagttcctggcccgcgaaggattgctgcgcctgacgccccccttgcccctttagcccaggtcgagacctatccgctcgaaggtgcctcgcatttacaggcaccggccatgggattgctggtgtggaaaaaacggttgggcgacaccgtcagtctgggcgagttaattgccgaaatcgtgccgatagaggcatccctcggcacgccgagagtgccggtctacagcgacatagacgggaaaattatcgtacagccgcttttcaaaatggtcaggaccgggcagcgcgtggcgttgctggcggggaaaacgccgcttgcgcaccgcaaagccggacaacttttacaacacttttaatcggaagaaccgccatgagcctgactaaagattctctgaataccctggccgacgccatccttcatgcgcatcaggccttgcgcccgcaggttgccgtaacggccctgacccacagcgctccgctgtcggcgctgaccggctgtgaagttttcttgaagtgcgagcacctccagcataccggttcatttaagtttcgtggagccagcaacaaggttcttgcgttgaccgacgaacagcgtaagaaaggcgtgatcaccgcctcatcagggaatcacggtcaggcactggcgctggcggggcttcgcgctggcgtgccggtcacggtttataccaccaccagcgcgtcccccactaagctggcggccgtcaaagcctttggtgccaaggttatttctctcgataccgatccgcttagcgtcgaacttgaggcggcaaaacaggcgcagcagcaggataccctgttcgtctcaccttataacgatctcgatgttattgccgggcaaggcacggttggcgcggagctggtcgaacagcttcccgacgtcgatgcggtatttatcgcggtcggcggcggcggccttatctccggtatcgctgcggcgctggcacacttaaaaccgggcaccgacatcatcggctgctggcccgagaatgcacccaccctgcaacgttcactcgaggtcggtgagattatcgagatggaagaagaagaaacgctgtctgacggcaccgcgggcggagtcgaaccggggagcatcaccttcccgctttgccagcagttggtgactcaaaccgtgctggtcagcgagcaggaaatccgcgaagccatgaaagccgttgcgcgctttgagcgctggatgattgaaggagccgcgggcgtggcattggcgggtgccatcaagctggcggcgcagtatcaggggaaaaaggtcgcagtcgtactttgcggccgcaacatattgctcgagaaattcattggagccattcaatgaaaatctatcagcagacgcagatagtcggcgcgatagacatgaaaatcgccgccgcccgcatcgccgaaggctttatcgcctattctcagggccgcgttcaggtgccaccggtacagaattttagctttgagcaggccaacggcgactgctgcgttaaatccgcctggattgagggcagcgagaccttcaccgtgaaaatatcaaccggcttttacgataaccccgccaaagggttagccagtaacgacgggttgatgctggtcctttgcgcccagaccggtgcccccaaagccctgttgcaggatgagggttggctgacctgcattcgcaccgcgctggcaggccagatagcggcaaaactgctggccccttcggtgattaccggcatcggcattctcggctgcggcgtgcaggcgcagatgcagctggagcagctcgtgccgctgactgactgtcgcaagttaaccgtctggggcagaaatccggccgcgctggaggcctatcgtcaattcgccgactcgttgggctttagcgtaaccaccacgcaggatgcccgtgaggtggcccaaaacgccaatctgattgtgactaccaccccgtcacgcgagccgctgttgcaaagcggttggatccagcctggaacccacatcacggcggtaggggcagacggcggcggcaagcaggagctagatacccatctggtcgcccgcgccgacgtcatcgcggtggattcggtgcagcagtgcagccaatacggcgaggtctcgcatgcagtaaaacaggggttgattgtcggggaacagctgctggaactggggctgttgctcgaaggcaaagtgcaaggccgcgacaacgatcggcagattacgctggccgatttaaccggcgtcgcggtgcaggacgcacagatagccggctatgccatgcaggcctgcgccgaggcgctgcccggcctctgatgacagtgggctattcttcgcgcagggccttgacgtatttatagaccgtggccctgcccatcgatagcacgtttgcgacatagtcgtaggcgcttcggccttcaaacgcccgctcgtgatacagcgcctcaaccagttggcgtttatcctcccgacgtagcccgttgagactcagactatttttatgcagccaggcgtgcaggaaggtgttgatacgctcctgccagtcgtcgcggaacagcgcttcgggctgcggcatgactcgactggcctggaaaaaaagattcagcgcatcgcgcgcctgttccagcaccgaataatttagattgatgcacagcgccatcactgcctgcccttcgccgtcgcgcaggatactggtaatggaacgcatacgctgcccgtcccaattaagcttctcgtaaggaccgatgctttgcgccgatcgcggatcgctgtgcaattcgtcgagcgcagagtcgtcgccaatttttcgcttggagagattattggcgatgtgcaccacctgctgtgttttcaggtcatgcaaaatcacctcggcgtgagggaaaagcagcgtcgcaatactgtcagcgatagtttgataattggtgggctgaaacgcgtttgcggtgctcataatctttcccgaggttggctagagcaattgataatacagtataaaagattgcctcaacatcccggccgttatctggcatttttccccgtgcagaattccctattccgtcatcgcgctgaaatataattgtcattgttatgtcctatggtcgagataactcaaccggaggacattctatgttcagcatggaccacgtacttcaggatcttgccccgcagcgtaaaacgccttcatggcagctgaatctattgaaacagctgttccgcgagaaagaatttcaacaacttgccgaaaacaaccgccatcttaaaggcgttgacatggtcgaacaaatcctcgactacttccagattcggtgcgaactttccgaccgttgcctcgaacagatccccagttatggtcccgtggtgatcgtcgccaaccatcctatcggtacgctcgaagggcttgcgctgctcagcgcggttgcgtcggtgcgcgccgacgtgaaagtggtcgccaatcgcctactttcacagattgagtcgttcagcagcctaatgatccccgtcgacaacatgggcggcaatcgcaccggacgagcgcaaatttcgatgatgcaggaacatttggaaaatcagggcgtgctgatcctgttcccggcgggtgaagtctcacgcgtcacctcaaaaggagtgcgcgacggccgctggcacagcggtttcgtcaagctggcggccaagacacgcgccgctatcgtgccggtacatatcagcggcaacaacagcgcactgttttacctgagctcaatggtttacaaaccgatcgccacgctgctgttggtccacgagatgtttggccatcgcggcagcacgcttaaactgcagataggcgcacgcattccctacgacagctggcacgacggtcactcacgagcgaaggatctggcggcacgctttcgcaaacatgtttatcgtcttgggcagggaaagcccggattatttagaaccgaatcggccattgcccgtgctgaagatcgcgccgtattgaaacatgcgctggaggcgaccgaggtgctcgggaagacgcctgatggcaagctgatttatctttatcgacgcaacggtgaagactatgtgcccattctgcgtgagctgggtcgactgcgcgaaattgccttccgcgccgtgggtgaaggcagcggccgcaggcgcgaccttgacggctacgacgatgactattatcacctggtgctatgggatccacaggcgctggagatagtcggtgcctaccgttttatccccaccgccgagcagcttgaaaagcaaggcctcagcggcatctacagccaaagcctgttcaactatggccatcagatggaccctattctcgcgcagggcattgagctgggccgcagtttcattcagccgacctactggggaaaaagaggtctcgattacctgtggttgggcattggtgcctatctggcaaaatatccgcagtatcgctacctgtttggcccagtttccatttcaggtggcctgccgctggccgcgcgtgacctgttaatcgccttctatcgcctttattttgctccttcactgccgctggctagctcccgccgcccttatccagcgacgctgcctgaagttctggcgcagttctgcggcgataattattcacaggacctgcaatgcttaaagcgtctgctggcgaattttggctgcagtattccgccgctttacaagcaatactctgaactttgcgaaacgggtggcgtgcagtttattgattttggctgcgatccggccttcaacaactgtatcgacgggctggtacttgtcgatgtttccatgctcaggccgtcgaaattcgagcggtatatcgcggtgcatcggaacattgccgaatccaccccgcagtaatgcccctaaatcgcggccagagtcacgactttgctgaccgcggattgacagcgtagagggcagcactacattaagaaaagaaacgtatttaagaccacctctccgttatgctgaggcgttgtctaaaaaataactttctctcttcaatggcgtatggggtccccatgcattgttcgcctgtctttacgctggaattgcaatgaaactgactatcctgattttgagcctgctgatgttgacaggctgtggtactggagcagccgaatctttgtttagaattattcccgttaacagcgacatctgcccacatggtcgcgacgtttccactaatcagtgcaacaattgaaaaatttcaccctctatccaaccgcagcgtttctttgaggtggtccaaaatgcccgtgtcaaagcgggcaagtatcgcctcgaagggtataccgcataggttgtcagttcagtcggcgcgtaatcttccaataccggcaccagtgaacccgcatcgatactggactggaagacaaatcttggcccgtaggcgatgccaatattgtttagcgccgaattgagcaacagctgcatgttgtcggaccttagccgacaccgaccgctgacttcaaacctctctccgcctttgctataaagcgtccagtcatcgggtgacgtcgcttcagaaaatagcagcgtatcgtgatgtgcaatatcctctggccgggtaggcaccccttttcgtcgcagataatctaccccggcgcaaaccatcatcggacaccccgccagccgctgggcgatgatagtcgagtccgccagatgcccgattcttatcgccagactgataccttcggtaaacatatccagatagtggtcggttaatttcaccttcagcgtcacattttcatgctgctcaagaaactgagcgataatttcgccgagatagtgctcgccaaacatgaccggcgcggtaattgaaagctcacctgacagtgaaatagcagactcggccacttcctgattcgcctgttcaagctcgtccattatctttctgcaacgatcgtaatagcgtttccccgctggggtaagtgtcagttttcgcgtagtgcgttgcaggagtaaaacggaaagggaggactcaagcgcgcgcagatagcggctggccatcggcggcgtaatattaaattgtcggctggcggcggccagactgccctgttcgacggtggctaaaaatacattgatagcggtgaaattatccatcctgattatgtactctcagtaaatagtgcatgaccttttcgtcatcttatcaccggttttttcgcagagtagagtaatcgctcaccttattgtggagaaccaacatgactcatcaatccccttcaccggcggccaacagaccgttggaactgatatttttacactactggggcggtagcgccgcaacctgggacggcgtcattaatctgttgcccgcggacgttaagacgcatacgcccgagtttcgcggctggggagaaaatcactcagagatgccatcagatgccagccttcacttgctcgccgcagacatagaggaatttattgcccgccggactacaggccgttatctgctggtcggccattcgatgggcggtaaggtcgcacaaattattgccggttcgcgtccggcgaatcttgcaggtctcatgctggtcgcacccgcgccgccgaccgcgatggcgttatcggcagagcagcgagaaacgatgatccatgcctatgactcggcagaatctaccgcgtttgtgctcgacaatgtcctctcggcgggcggacttccacacgcaatacgccagaaagcgctgcagacatcaatagcaggcagccgcgacgccaaaacctggtggcctaaggtcgggataggggaagaggtgctgaaacaggccgccagtatcgacgtacccgtccatgtgttgagtggcgaaaaggatcgagtcgatacacccgccaccctccaggaaaagttaatgccgcacctcagtaacgccagacttgaggtgattgagggtaaaggccatcttttgccgcttgaggccccgacagccatcgcggcctcgctaatgcagtttatcgatctccttctctcggcggattaattaaaaggggcttcgccggccaagactttatcgatgattttcaacacaccttcatcattgttggagacggtggtatagctcgctgcggcttttgcagcgggcatagcattggccatcgagaaaccgaatccggcctgcctgagcatctcgacgtcgttcccccgtcgccgaaggtcacgacctcggcgtcatcaatattccagattttttgcagcatgctcaatccgttggccttgtgacggccggggataatcaggtcggcagagccgtgaccgctggagaccggcgtaatgatatggcccagcgcctcgtcgagcgaggtcataaaattcgccaggtgttggtcgtcaatgttggtcgcgaacttgaaaatgctatcgtcaatttcctgataatctttgatttttttcagccgaggatagtaatttttcatcttctgatagaacgcttcgggttgcgacgaaagaatgtaggcgctgttcttgccgcaaattaccgtattgaggccggggatagcgtcgatgaatcgcagaattttgtcgaccgaatcggcactcagttcagcgacggagaagtcttgctcttcattaacgatataggccccattttcggccacaaaagcgatttctggcgcgatttcagggaagaaggatttcagctgatagtactgattaccgctggcgaccacgaacttgatgctccgctctttcagctgctgatactgtgaaagaaactttgttttattatattttttctggtcatcgagaaacgtaccgtccatatctactgcgattagttttactgacataggtcctctcgtccgttcaaaaattaaccttgatgataaaagctctaggttaaagataaaagaaaaaggccaacaatgtgggatcgttggccttaaatacatgcaaattcacgattatcgtcagaaaccgtagcggatagcgtccttacttttctgcatcaggccgtcgattttgtcagaataaagctcaagccccttaccgtcacccgcctgcgagcattcacgccgcttggcgttgtaggccttcatcaactgcgcctgtgcaaaaccgggcttgccgtagcacgccatgctcttctcccagcagacaatggccgtgtcggtatcctgctgttccgcataacgtttacccaactcattcagtgccttggcacagtccgcaggtgccaggttctgtgccagaatagcgtcgatttcaatcgtcatatcagcctccgtgtaacctagtggaagaagttaaggatgtgaccaaataccagcccgacgcttatcacgtccgagtcgctgaaggtcacgttagacaaaccaaatttaccgagcaggggcagcaacagcgccggaagcaacgtgataaatagcccgtggaagatgccaccgatgatagccccgcgacgtccgccgacggcattaccgaatattccggcagtgcctccagcaaagaagttggtcagcatacccggcagaatcatcgcaagcccaatgcttgggaacaggaacatgccgatgatggagccgatggtggtcgagataaagccgatgatcaccgcgttcggggcgtaagggaacagcaccggacagtcgagcgccgggatagcgttgggcacaatgcgcagcgcgataccgcgaaatgccggcacgatttcggccagcagcaggcgcacaccggctagcaatacataaaccccaaccacaaactgaatggattgcaggaatgcataaaccagatagttgacgctgttggcatagggcgcgatcaccgcaggtccggcgacggcagcggggatgagataaatcgggatcatcaccaccatcatcgacagataggtgtcctgcaggaaggagaaggcctgcggcagctcgaaatcttcggtgctcttactgacgtcgccggttattttggcaacacccgcctggataatgtagccaatcgtgcagaaatgaccgagggcgatatcatcagagccggtaatcttacgcacaatcggctgtgccagaaccggcatacccaccgccattaccccggcaatcacgccaccgatcaggataagttcggtgccgcgcaggccgcccatatatccgataaccgaacagacggttgccatccacagcgaggcctgtccggtcagaaagatgtacttaaagcgggtgaaacgcgcgatgagaatattaacgataaacgccagcaccatgattaatgccgtttcacgcccgagcgtctgctgcgcaatcccggctattgagccgacgtcggtcacgataccgcgcatgttgaagcctttctggaatatctcgcccaggaaggttaacgtcgcgacaataatacttgcccctgaaagcaacactaaaaaaccgagcaacgttttcagcgtaccggtaatgacttgccccggacttttctttaaagcaatcagccctatcatagcaatcagggatattaaaatagacgcctggcccagtacgtcgttgacaataaagtgaaggaaagacatataaagtcccctgtagagttcacggtgatcgagctattgggtaagatattgttctaataacaggctctgagttttttatatcactctattttactgtttactgttaatacgccatcagccccatttcttgtaacacgggcgtgagtttttcttttatttcttttttatccaccagacgtttcagataaataatggtggcactgatattgtaatgcgcgaactgtgatctgaaattctcgccggtaaaaataatatcggcacgcgtagacgttgcgctggagatatcgcagtgagataaatcggcatcaataccgagatctttcaatgccgcttcaatactcatttcacaggcaaagctgctgccgagacccgcaccacataccgccagaatagataactttttcataggtgttccttgggttgccgttaattaataagacacacgtcggatttccccgatggcatgagtgccaaagggggagacactcactagtactgccgaatagcctgcagtacgtcttctttgctatggcattgtcgtaatttttgcaccacctcatcgtcacagaacaggtgcgacaggctggcaatcatttctatatgtgaatcactgtctatggctgcgagggcgaagacaatgtagaccggatcgttatcttcgctatgaaactcaacgccttcagaaacaataaccagagagagggcggtatgaattaccccttcctcgggtcgagcatgcggcatggctatcccttcacccaggacataataagggccgatttctcggtgcatatcatatattgcctggagataccgtggttcaacggcacccgaatcgatgaggggttgaacggctaatgccacagcctgttgccagtccggcgtatgttcaacgatgttaatattactttcattaatccagtcggttaacatattacctcttcaaaaaatttgtttaaaataaaaatgacttacctcagtattctattaataaataacaaaaactgtgatctacccattcctatttatcattgatgaaaaataataatacgcaattatatctgaatttaatgacacagagactcaatgcttaccgagttttatgtcaggcaacattatcaagcttaaacgtaaaattacgttatattgtggctcaatgattatcgtgtgagattattgtctatccagcttttgatagcattaatatcaacagggaattcctgattagaataatataccggacctaatcccatcggctgagcttttccagctaatatttttaattcaggaatatattctgcacctaaatgtcccgcgacacgctcgcctaatcgcgcctcataacgcgcagctgcggtttctgccgatacctggcaccaaatttctaaaatctgggtgacacccgcctgagtcagatagtcgctgagcacctctttgggctgaaaaccgaaccaggcatcaacaataaaagtactgccctgcggcgcatccgccacgatagaccagataacctgataactggcctgcccgagcttacggttaaacgcgcggtctacaccttcgattcgctggagaaacggatttttaatgccatcaagcgacagcggtaaccagccggtcttagcagaaagtgcaacggcgagactggttttacccgaggcagggattccattaaccagaataacccgtttgcccggcgtgcccagcgtatcggcgttaaccccttctctgctctcagacatgttccacctgttcggttgaggcgtttttacccttttgggccgccttataatattgttggatgactgcctgtagctctttcaagcgcggaaccgcgaccgtttccagcttgtttctggtggtggcgtgatccagagagatgcagtccttccacagtgaacgtccggcaatcacgcccgatgcgccggtactcatggcatcttcaacctgcttaaggaaggtggcgtggtcgacccctgctgacagtacagcccacggcacgtctccggcaagcttagtgatatctgcacaggcctgcttagaccccggatacggcagcttcagcacttttgcaccggcctcgaggcagatttgcgttcccccgtaaatcagttcaggcaccttagctttatattcctcgtccgtttcgctatcaagcttataggtcaggaactcgacgaccagcaacaaatcttcaccgctgaagtctttaatgcatttatgcaggatctcgatattgtgacgattagcttccggtttgtcagagcgcagatacaccatgatttttccgccggtggcgcctagctcacgcacacgacgcgcatcaacgtctttagccaaccgcgacaggcgatagccttgcgcagaagtgtcccaaccggaggcgtctagcccgatgagcaacgcggtatcgcgggcaataatgccatcatcgaccaactgcggaaccgcgcagacaggatcgacgagtacgcaggacgctttgctggcaagatactgggtgatgtcggccttgatcaggcctaactgtttttcggagatggaagcctgctgctgtgggtcgctggcaagcaaggtgcgcatacctccgcgctgatcgcaggcgataaccagcatcgcaccgttctggccacaaatttgctgatagccacgtaattctgaagttgacaactttgacatgaaactctcctttgcgtgaaatttattacagattaaaaaatctcgattacactggacgctctgtcgtttcccctgtgagcaagggaggccgaaaattcatgaacaatgccggttttaaagggtttaacccctgtgtggaacattgctttatcacggctattgagcaataattcctcaaccaacgctttgagtgtaattcattacagaaaggaatttcaagctgaaagagccaattttgcaagatattgcagcaacgcgcacattaatgcatatggtggcaaagctgcactacgagtccgatatgtcgcaggtcgagattgcccgcaagctggatgtctcgacggcaaccatctctcgtctactgaataaagccagagccgcgggcattgttcgtatagaagtcattgggttatcttcacctgaaaacatgacggcggatcttatccagcgcctcgggcttaaacacgcctacgtcgtcgacgcgccccaaacaacgttctggactctttgcgcacgccactggcctcgctgctgtcgcaggcaggtctgagcgcgggttcggtattagggataggctggggtcgtgcagtgcgagaggtgacgctggccggactgccgcgcctgccgggcgtattgaccgtggcgctcaacggcggcatgcagcaggccgcaccacattttcagataaccgaattcgtgcgccgagcggccgagcagatggagggaacgccctatttccttcacgcgccttatatctcctccccggaactgcgcgaggcgtttctacgcgatcccagcgtgcaggaaattatttcactgtgggacaggctggacgtggcgatcgtcggtatcggtctgacgcacgaacctcgtccgagtgagagcagcaccgcaacgccgggtgaacaggcgctcagccatgccaatggcgacgtgctgcgccactacatcaccgagtccggagagattctgcattgggaaggtgaagagcggatgattgccgcctcggtcgaacagctgcgccgtacgccgctgaccatcggcgtggccgcgacgccagaaaaggcggcgggcatcatcggtgcggtgcgctcggggatgataaactccctggtcaccgacgtgaataccgcgcaggccatactcgacagactgccgttaaattaggcttaagcgctacgctggttgatcaagtcctgagcacaggcccaggcagagctccaggcccactggaagttgtagccaccaagccagccggtgacatcaaccacttcgccgataaaatacaggcccggtaccgcgttggcgcccatggtttttgacgacagcgcgcgcgtgtcgacgccgcccagagtcacttcggcggtgcgatagccttcggtgccgttcggctgaacctgccagttttgcagttgctcaatcagtgccgcctgctgcggcacattaagctgcctaagggtgacgtcaggaagctgtcccagcgtttgtagacattccaccagccgtttaggcagatgcaacgacagcgtatttttgaggctctgattaggatgatcttgacgctgctggttaagaaatgcgctaaggtctaggttaggcagtaagttaacgctcacaaactcgccaggttgccagtagctcgaaagctgtaaaacggcgggtccagagagtccacggtgggtgaacaaaatactttcacggaaaacagtgccgtctgccgcggtcatcaccgccggaactgagaccccggaaagcgtctgcaaatgttcaagcagcggcttgtgcagggtaaaaggcaccagaccggcacgggtgggcaatactttgaggccaaactgctcggcaaggcggtaaccaaacggtgaggcacctaatcctggcatggataacccccgctcgccactacaagtgagcgagtgctcacttcttgaccattcacctgaatcgcatagccttgttcagttttttcaaccgcgcttatctcactgcgcaagcggaaggtgaccttacctttttggcattcttgttcgagcaggctcacaatctgttgagcagaatcatcacagaaaagttgacccagcgttttctcatgccaggcgatgccgtaacggttgaccagatcgataaaatcccactgggtataacgcgccagcgcggatttgcagaaatgcggattttcagaaagataggcagccggttcagtgtgcatattcgtgaaattgcagcggccgccgccggacatcaggattttacgccctagcttcttgccattatcgagcaacagtaccttgcagccgccctggcccgcctgcgctgcgcaaaacattcctgccgcaccggcaccaatgactacgacgtcgtactgttccacaaaaacctctctctataactttcacacgtcaaaaagtgattacgcgttaaaacggcggggataaatgccaacgctgtgcaaaaaagcgtcaattcagcctgttgcgtgccagattgtaagctctgcggcgtctataagctagattctcaaacattaatccgcgctggtaagaaaatgtttcagaagaaaaacgccttttaactcaataggtttcaaagccttactttgcatacccttgattttttacctatctttagtcaaaaaaatgtcatattttccttttccactcaccctgttctcgcagataatgcgcggcgttcatgtccacaaactggcgtaacaattatgctgcatttattcgccgggttggatttccataccggcctgttattgattctcgcattgctgtttgtgctgttctacgaagccatcaacggtttccatgacacagcaaacgcagtcgcgactgtgatttatacgcgcgctatgcgttcgcaacttgccgttgtgatggctggcgtatttaacttctttggcgtcatgcttggcggcttgagcgtggcatatgccatcgtccacttgcttcctactgatttgctgttgaacgtgggttctgctcatggtctcgctatggtgttttctatgctattggcggcgattatctggaacctgggtacctggtatttcggcctgccggcctccagctcccatacgctcatcggtgccattatcggcgtaggtctgaccaacgcgttaatgacccacagctcgattatcgatgcccttaacatcccgaaaatgattagcattttcctgtcgttaattatctcgcctctggtgggtatgattgtcgcgggaagcatgattttcttgctccgccgttactggagcgggaacaaaaagcgtcagcgcatccatctgacgccggctgaacgtgagaagcaggacggcaagaaaaaaccgccattctggacgcgcattgctctgatcctttccgctattggggtaagtttctcccacggcgcgaacgacggtcagaaaggcattggcctgattatgttggtattgattggcgttgctcctgctggcttcgtattgaatatgaacgctaccggttatgacatcacccgcacccgtgatgccgtgacgcatttgcaacagtactatcagcagcatacggataccctacagcacgtggttgccctgactccgctggtacctgcgccgacagacagcagcactcagacgcccgtcgagttccactgtaatgacagccttgcgcttgaagcactttctcgtactcagggaatgctgaataacctgcaaagctacagtgaactcgcgccggaacagcgtagccagatgcgtcgcctgctgatgtgtgtttccgatacggtagataaaacggctaagctgagtgaaaccagcgctgccgataagcgtttcctcaacgatttacacggcgatctgctgcaaaccgttgaatacgcgcctatctggattatcgttgccgttgcattagcattggctctgggtaccatgattggctggaaacgcgtcgcgaccaccatcggtgagaagattggcaaaaaaggcatgacctatgcgcagggtctctctgcacaggttactgccgcagtttctattggtgtggcgagctacaccggtatgccggtttcaaccacccacgtgctctcttctgcggttgcgggcaccatgatagttgacggcggtggcgtacagagcaagaccattaagaacatcgcgctggcgtggttgctcaccctgccggtgtcgattctgctctcaggcgtactgtactggttggcgctgaagctgatttaacggactttatgcgtaaaaaaggcggtgcatgttaagtgcgccgcctttatttttttgcctcaatattcagactcactgtcgtttaactctcattcatcgtccttttttatcggatttaataccaaatcagcatcgccaacatactgatgaggattaagccgcataaccctgttgttagcacaaattgtccgcgaaccctttcacaacgacgaataaactcggggtcgtgatgatcaacatagcgctgcgcatagatgtaacgcactaacctaatttgcttactgggctgcccgtgcgcggtaaaaaatcctcctccgtcaacatactgataaagcagcggatcgcatcctcgtaacaccaccagcaacgcacgaagagaagagtagtagcgcagcatattcacaacacatacaacacataaagcccaaaatagcgcaatgggactgatcatgattcccccttacggcgacatctatacttaccgtcagcgacctgtaagcctttcgccctttctcaccgccttttacccgatacctgggcaattttatgcccgcccccagaccctttccgggctagccaactcagcgttcgcttcacttgcgaaaagaggcaatatgccgaactcccgcttattattgagtgtaggaaatgaaatataaatcgggggacaaaaaaagaatatttctgtcgctaagcctgttcgaacaatgtgatgcaaaccattcgcctggagaatagtccggcataagtagacgttttatggctatacttgaggtaggttaagtttttagactgttgtttatgcaacattagtttatgaaagtcgtggttatacggcagtactggacgacaccccgataatccgaataaacgttaaatgacttatggaaggagtttcttatggcttataaacatatcctcattgcggtggacctgtcaccagagagtaaagtgctggttgagaaagcggtctcccttgccagaccttacaatgccaaagtgtctcttatccacgttgatgtcaattattcggacctctataccggcctgatagacgtcaacctcggtgacatgcaaaaacgtatctctgaagaaacgcacaacgcactgagcgaactgtcacataacgccggttatcctattgcagagaccctaagcggcagcggcgatttggctcaggtgctggttgatgccatcaaacaatacgacgtcgatctcgtgttgtgtggccatcatcaggacttttggagcaagctgatgtcctcggcacgccagctgattaacacggtacacatcgatatgctgattgtgcctctgcgtgaccctgaagacaccaaagagtaatgttcgtactctctccgggggtgtgatgttgcatctcccgctctccttgttttcatcaataaatgacacagctcaaatttcgcttcattaaatttagatcaacttgcatcccactatacaaagccatttttttcacttatagctagtcagtcattagcgaacaaatggaatttgttgccctatggaaatgcactcatctcacccaaatacgccgcgtccgttagcccgccattacagtattgaaactacagcccagctttgcggtgtattgcccataacgctacgcacctggcaacgttatgggcttattcacccacagcgcgatgccaaagggagccgctggtacagcgagagcgatcttactcagctacatacgatcttgcgaaaagtcacggacggtattccgatcgcgcagatccgcccgcaccttagcgcgtcagagccaaagcggatagccgagaatatcggtccagcacctcacagcagctggcacgctctacaggcagagatcttaaacgccctcggcgagggtgagttactcaagctacgtcgtttgatttggcaatttgggcgagaatatccactcgattgcctggttaaccgggtgcttcgccctattcgcgcctttctttccaccaacagacagagactgccgatacagcaaaaagggctgctggacagcatcataattgaatatgccacctaccttatgcgtacgctgcgtcacagggcgcgtccgcaggtactgttgctgccgatgcaaatcgacgatccgctcgagctgtggctggagtcactgaggctgtgcggcgaggggcttaacgtcgagatagtccactgcgaggttgaagagccagacttggcggcttcgccgatggagcattatctcatttggtcagacacgccgctggacagtcgccagcaggccgtgtttgattcgtggttaacgcagggcctgccggtgatgctgctcggcaaggcaacgctgcttaaagcggcgtgtaaatatcaaaacggtggctcttagtggtcaccgccgcctgagcaggcgtatcggccattggcggggcatagtcggggcgttttaccactattcgtttggtcgccagacggcgcgcaggttcgagcaggccgtctgcatcgtcatccgcaccgaccagcccctggaagacccgcatctcttttttcaccagtgcactcttctgtcgatggggtacatcgggtcgagataaaccacctgcgggcgaggtgtgatttcgctgagcgccgtcaggcttgagccatggagcaacgtcatgcgctcctgcagccaggcaccgatttccgcatcgcggtaaccgcgcgacaatccgtcgtcaagcaacgcagccaccaccggattgcgttcaatcattcttacccgacaaccgagcgccgccagcacaaaggcgtctcggcccagccctgccgttgcatcgacgacgtcaggcagataactgcccttaatccctaccgccttggccacagcttcaccgcgtccgccgccaaatcgacgacgatgccccagggttccgccgacaaaatcgacaaagatggcacccagcttcggttcgtcacgcttacgcaattccagtctttcaggggtcagtaccagcgccatcagggcatctggatcggaaaccagcttccagcgctcggccagaatagataaggcgcctgcatcggcgccttcttcacatgctaaaaacacactcacgggaggttgttatccttcgaggctctgctctttaatatcataatgacgaagcatagcatccagctgcggttcacgaccacggaagcgtttaaataactccataggttcttcggatccgccgcgcgtcaggatattgtccaggaaggactgaccggtttcgcggttgaaaatcccttcctcttcgaagcgtgagtaggcatcggcagacaacacttctgcccacagatagctgtaataacctgccgcataacccccggcaaagatgtggctaaacgcgtgcgggaaacggccccagctcggcgaaggcaccacggcgacctgctttttgatctcggcaagggtttcgaggatccgtgcacctttggctgggtcatactcagcgtgcatacggaagtcaaacaggccgaactccagctggcgcaggataaacagcgccgcctgatagtttttcgcggccagcattttctcaagcatttcctgcggcagtggctcatgggtttcgtagtgaccagagataaacgccagtgcgtcaggctcccagcaccagttttccataaactggctcggcagctcgacggcatcccatggcacaccgctgattcccgcaacgcctgaggtctcgaccttggtcaacatatggtgcagaccgtggccaaactcgtggaaaagcgtggtcacttcgttgtgagtgaacagcgcaggtttgtcaccgactggacgggtaaagttacaggtcagataagccaccggatgctgcaatttaccgttgctgcgacgcaggctaccgacgtagtcgttcatccacgcaccgccacgcttgtgttcacgcgcgtagagatcaagatagaagctgccgcgcagttcgccgctgtcgtcaaacaggtcgaagaaacgcacgtctttgtgccaggtatcgacgtctttgcgctctttggcggtgatgccgtagatgcgtttgacgacttcgaacaggcccgacagtgcacggttttcagggaagtaagggcgcagctgctcgtcgttgatggagaacaggtgctgcttctgtttttctgcgtagtaaggcaggtcccaggcgttcatttcgtcgacgccatagttggccttggcgaatgcacgcagctgagccagttcagcctcaccctgtggacgagcgcgtttggctaaatcattcaagaaaccaataacctgctgcgggttttccgccattttggttgccagagacatatcggcataggagtcaaagccaagcagttcggccagttcgtggcgcagcgccaattcttcggccatcacttcgctgttgtcccacttacctgcgttggggccttggtccgacgcgcgggtggcataggcacggtacatctcctcgcgcagctcggcgttgtcggcgtaggtcatcaccggcatatagctcggcgcgtccagcgtcagcagccagccttgctgttctttggcctcagccagcgccttagaagccgccagcgcactctctggcagaccgcttagcgcctcgacgtcagtaatcagcttgctccagcccatcgtggcgtcgagcacattattgctgtaggtcgagccaagctcggacagacgagaggtgatttcaccgtagcgtttctgcttctcggcagacaggccaatgcccgacagctcgaagtcgcgcagcgcgttatccaccgcctttttctgctcgagcgtcagagtggcaaaattatcgccctctttcaggtcgcgataggccttatacagtccttcatgttggccggcccaggtcgaaaactcagacagaataggcaagcattgctcataggcggcgcgaagttcagcgctgtttttgaccgaattcaggtgcccaacgggcgaccagatacggctgaatttgtcttcgctttcagcaatcggctgacacagcgattcataggtataagggccagactgtgcgacaacctgctcgatagcggcgcggcatgcgtcaatggcagccttcacggcaggaacaatatgctccggacggatggcggaaaatggcgggagatcgaactgttccaagagcgggtttttagctaacgaatcgttttgcgtagtttgggtcatagggcagtcctgatttaagagacatcatcgataagtcgtaaaaactaacatgaggacaacggcgttcaaaatcaagggcagacggtgctggacttgctaagcctggaggcatcggcagagtatcctgtgccactttcttatttctgcggataactcggcactaaaagtttatactgtcgccataaattattaggaaaatgtaaaaatactatgttgagttatcgccacagttttcatgcaggcaaccatgccgacgttctgaaacacaccgttcagagcctgatcatcgagtctcttaaagaaaaagataaaccttttctttatctcgatacccacgccggtgccggacgctaccagctgagcggggaacatgcagaacgcaccggtgaatatcttgaaggcattgcccgcctctggcagcgtgatgacgtgccgcaagagatggcggcctatatgtcggcgattaactactttaaccgcaatgagaacctgcgctattaccccggttcgccgctgattgcccgccacttgctgcgtgaagacgacaaactgcacatgaccgagctgcacccgagcgactttccgctgctgcgcaacgagttccagaaagacgaccgcgcccgcgtcctgcgtgccgacggctatcagcagctgaaagcccaactgccaccgccgtcccgtcgcggcctgatcctgatggacccccgtacgagctaaaaaccgattatcaggacgtggttaaaggcattcaggagggctataagcgtttcgcaacaggtacttacgctatttggtatccggtggtcatgcgtcaacagatcaaacgtatgctgcgcgaactcgaagcgaccggcattcgtcgtattctgcaaatcgagctgggcgtgcgccctgacagcgatcagcgcggaatgaccgcttccggcatgattgtgattaacccaccctggaagctggagcagcagatgaacaaggtcctgccttggttgcttgaggtgctggtgccaaacggcaacgggcatcagctggttaaatgggtcgttccagagtaactttttcctgcaaagccggggcttctctccggctttcattcagctaagctattacaaccatcgttgcaatctttgcgacaaagccgattcaggcgttaaactctatgccattagattttgggaacaaccgcttcccggctttcttctcattcttaacttatggaaaattcgatgaccaaacattatgactatctggcaattggcggcggcagtggcggtatcgcatcaatcaaccgcgcggccatgtatggacaaaaatgtgccattatcgaagcaaaagcactcggcggcacctgcgtcaacgtcggctgtgttccaaagaaagtcatgtggcacgcggcacagatttctgaagccattcgtaactacggtcctgattatggtttcgacacccagattaacggctttaactggaagacactggtcgctaaccgtaccgcctacatcgaccgtattcatacctcatacgacaacgtactgggtaagaacaaggttgacgttattcacggcttcgctcgcttcgtcgatgctcataccgttgaagtcaacggcgagacgatcaccgccgatcacatcctgatcgccaccggtggccgccctagccaccctgatattcccggtgctgaatacggtatcgactcagacggcttctttgatctgttggaaatgccgaagcgcgttgctgtagtcggtgccggttacatcgcagtggaaatcgccggcgtgatgaacggcctcggtgctgaaacccacctgttcgtacgtaaacacgctccgctgcgcacctttgacccactaatcgttgaaacgctggttgaggtaatgaacaccgaaggtccggcgctgcatactgagtcaattccaaaagaagtggtcaaaaatgccaacggcagcctgaccctgaaactggaaaacggcaaagagttcgaagtcgacagcctggtatgggccatcggccgtgagccagaaactgacaacttcaacctgaaagccaccggtgtgaaaaccaacgccaaaggctacatcgaagtcgataagtaccaaaatactaacgtcaaaggcatttacgcggtgggtgataacaccggtgcggttgagctgacgccggttgcggtagccgcgggtcgtcgcctgtcagagcgcctgtttaacaataagccggaagagcatctcgactatagcctgatcccaactgtggtctttagccatccaccaatcggtactgttggcctgagcgagccagaagcggaagagaaatacggcaaagataacgttaaagtttataaatcttctttcacagcaatgtataccgcagtgactcagcaccgccaaccttgccgtatgaagctggtttgcgtcggtaaagaagagaaaattgtcggtattcacggtattggctacggcatggacgaaatcctacagggcttcgcggtagcactgaaaatgggcgcgaccaaaaaagactttgacaacaccgtggctattcaccctaccggtgctgaagaattcgtgactatgcgttaattgctttattacattgatcgtaacgtccatcggcgttgagccgatggaccccgtttatgcgccattattggccaggaactcttttactccaggatgattatcgctatgctgccagagatgcgtctcatctggactattattatgctcccagggtaaacgcattgaatcatctatattagtcgtttcagggatcaagcttgctaattccatgatcataattgcttgagtatccggatttttcaacagtaaagacctttttagtgcaccattttcatgaaacctgatacccgcaacaatcatacttttcgtgcccatttttttcataaaatcttctcttaacatatggccatcttttcctataaaatagtcaataccaatatttccacgtgaaatctgaagttgctcattacgctgggcggtaatttcttcaggcacgttccagtttcttaaatagaaatagtctggtactgatttacccccttccttaactgaagcatgcatgcactcatgcaacaatacgcgcaaccggcttaaacgcgggagtgaaaaaaaacggtcagtaaaagcgatgacatttttctgctcattataataggcattgacgataccgcccctgggtccgaaaatagacaccgtcttaatacttttatcagttttgatcaaaaatttatgggtaaccttaagcgcttgaatattcatcttaatttcttgaatatcagcctccgccaatttattaatatcgtcataacctaaatatcttgcggctatttcacggccctgtggcgtatcgatcgcgacctctgctatctgtagcgcctcttccatattattaaaagtgaccgttgtcatccatcctcgcgataaattatcggctttaatggcgtttaaaccacgttgacgcacaaccgtctctttgaataaacgattaatgaaggtaccgcgctgtagagtgtcatcagcctggctgggaccgggtttatatatttcatcggcctcataggttggaagttcatcgatttcattatcggcagcgctaaattcttcagcgggtgtttttatgtttgcgcccattaatccaaataacgtattaactcctccatcaataacattactcaaacctaactttcttcttctttccgtatcaccataaatagaatcattaattcccagtccagtttgtataatgccaatccccaataggctgagactgcctattgccggaagcacgacggtgaccacgcctgccatatttgcagcagcccgaagattcatcaatactttctctttaaatacttcgccgttggttgtagtaagaatatgtgcatcactgagggttctactttcggatttatgcatcatttcagtgaaaagatcacctttaaatactttctggtgataatttaaatattttgtatccaacttacctttcgccagtgcctgcaaagtagagtcaacgccaggataataatgcccctcttggcggtcgtataaagagaagtggttggcaagttcctcgcacttaatggggtcccttgcctgcactaatacccaatctatcagttctttagtgctttcaaactcaacaaaactctgtgttcccgaagcctggtacaaaacaattttaccgccattgccgtggatcagataaatatcagtggctggataaccataaatatcaaaagtagagatacttccggcgtattggttcctgacttcacgttctaactcctttatagacatatcgggcaagcttgcaatatcacccaatacagtccttgtcaccaatttcaaactagcctctgacaacagccctgagttttgacctaacagggtaatgaaaagtcctttactgacggtgcgaaagcttatgcggttttttctccagaagtttttaagctgttgcagaaatttatagctaaaattactttcgatcactaaatctaaaaagtctttgggcagtaaacggacttcattatttttgccaaattgttcagcccgtgctccttcagtataaattcctgagttagcacttagtgcgtcggaatttatttgatcctcagcgccaaaattttccagcagccgctcggtcagcgattttgactcaacgggacgggtggtatgttcccagccggtgaatgttttagaggaagttgatccataattaaatcggttaaaatatgttgtatcaggatcaatctctaaagcatatttctccctgatagcttttcttaaataagcagaagctaatgaagtcaattctggatattcattttttatctgaaagactgcctcaatatattttcgcctgtcttcaactaagcctgacggctcagtcgtattattgatttctactccctgatcttcagtcatcgtgatattaatcggttctggcaccataaaggtgttggttaatttaggctgggtagataaaatcattgaaagtggaacaggtaatgcatcactttgatcccagggaagcataccattaacaagtgaggaaaaagcaccgtcaatgtgagtgatgatattctgtgcataccttgcagcagagtttcgcgggctttgaacgaccgggcctcccagagcatcatgtgggctagcgttcagcggcgctgccctgatgttaatatcgtaggtcagtaactgtgcagctgcctgtatcgttagcgcggcacctgttagaacagggaaaagattcggctcgcgaggcaataatcctcgccctggtagaaaatttgaaccttgcaccatttcctgaaatttatatttattgcggcaataacttgtccagtcactcacggatgtgatttttttctgattattaccaatctctttaaataataatttaccactcggagatttatcattgctgtgattaaccagtaaatcatgacctttcgtagatgttaattcttctatgagcattgatagttcccattatgtagaaaatattaaaattctaatttccatttaaaacctcaagacatcactcagagaaatgtcactttattaaatagttattaattaaaaatttcattaaattaaaacaaaaaagtccgtgggacttattaacatataaattagaaataaaataactataaatatgagctcaaatttattgataaaggataaagagatgactactctaacaacatcgtggctatgcgttaattataatatctatcgatattgagtcgatggacaccgtctttgggttaacgaagtctggtgttaacgacgtcggcgtgagaacattggccggccgccattctcccagggaagcttcattttcccatcaagccccttcgcctcaggtatagttccagataattccatcaccatcatcgtctgagtatcaggattttttaataataatgctttacgtagatcttgattaacacggaaattatttaccgcctcgtcccaattattccctcccattttttgcttgaaattgtcttttagcagataaaatccatcatcactaaaataactgctttcaagttttgcctgagagacgtataacatctcatcacgatatttcattaaccagtcaccgtcagacgtcattgcttttatgtaaaaataatccggcgtgcattctgctccttctttaacacccgcatggactatttcatgcattaatgttcttattctaagaaacggatcgtcattaaagaagtattgagtcagacatattgagtctatcattggaatataaaatgccacgattataatatcatcgaccactttatgtatcgcagtgatgaaaaaattaggattttgactgcttctggtaatcacccccctcatatcaattatatttttatgcaaattagccatatcttccgcactgatatcagcagctttttcaagccccaaatagcgcgcagctatctctcttccctcaagcgtatggagtctattagacgccaagtttaaacattcgccgacgtcagtcatagtgtaacgaatgtagtcagcacggattatgctgtttttttcgatagcagttaaaccaacgagttcaaattcatagtttgcaggggatggataacattactataaggcactatgttactattaaccttccccgctaaaacattaccaggattgggatccccaatattgacagtcttaacatggtatgaaggctcaggattgatctcagcttgaggctcaagtatgtctgcctcgataagcggtgcttgtatctccgcaacactttctctcacggcagttcctcctacttcacccgctcctgctagtccccctgctgctgctcttattgttcccagaccaaaggcgccaaacaccatgttaagccccctgaaaaagtctcggcagcgcccgctctacgcagcttttcagcatcaccgtgaaatgcctcgtcaatccccaaccctatctgaagagcaccaatgcctattagggcgagagaccccgcgggtgggaaaattagggcaaccacccctgccgccatcgccgcaatcgccgcaatcggcaaaattcgcattaaattttgcttaaatatctccagattgctagttattaacaactctgcatccgatattgtgcgatccatcactttagcagtcatcaaggtaaagagatcgccataatgcatatcaagattattattaatatgttcatctgaaagcgagccagcgccaagcttgattagtgatgaatcgacaccaggattaatcatattgtcctgacggtcgcggagagaaaagtggcttgccaatcgagtgcggagataaggatcgcgcccctgaacctttatccattctttcaactcttgatgattatcaaactcctgaaatgaattttcgttcgtcggccgatataggacaaccatgttattcattttatgacctctaagcccatcagcctcacttatgataaatacgtcactcgatttataaccattaatgcttaatggaataacatcaaaatgtacctgaggcactgacttttccaaatgttccatagtaatgtgagtgatattagtaatatggccgagggttaaagacatcaccatctttaacgccggatcgcttaattgattagactgctggccgagtagggtaataaatagacctttaatataaattcggtaaatataataatacttgttccaaaaactttcgagcttttgggtgtaaattttcgagaaattactttctattaccgtttttatgaaatcctcaggaagcaggcagacttcattattcttaccaaactcgcccccggcgtactttggttatagaggccggctctgccccttagaataatatcattaagcccgtcctggacgacggagttagacaataactgttcggttaaagtcttaatcgccagtggcggcccgacgtgttcataaccggtaaagctggtacttgaaggccaagtagagtttgacttgggatcaaagagaacaaacattactttatccggatcgaggatgaggccgtgtttatcctcaatcaattgttttaggaatgctgaggccgtcggaaataattcaggaaactcgtgtttgagtacatcaactatcttaagataattggctatatcacgtgcagtggaccttgcctgatgagtactaattgcatttttgccgacaccctgactgcggacttttacaggaaactcgtccaagatgttggtccagggctggttatgtatcacattggcatcaacactgtcccacagagtcattttattgactaccctatttatggcatgatcaacgctatttttaaaatgagaccatgatagcaccgggctgttattaaaagcgacggagagcagacttggcacatttagttgagcagcagccagaataataagaccttttaccgtcattttaggagacaagtctggcaaaggcggtaacagtccctgccccggtgtacagcggggtgcgcataaagcctgttgccattgggcgctttctagatttcttttttcggccctatgctcattagaggtaatcacttttcttatatttttaactttacttactttagagtcacactgatttattattttatatggaggtgtaaaaataacatcatgcctcgttgaataatctgctagtttattatgcataacaatccctttggttgttaacctaaaattgacctttataaaaaagtaaaaaactgaagaattttaaatattattattcatgcaattatgacccttcgtgagctttaatattactctgagagcatagataattacctttatgtagaaaatataaaaactctgatttcaattaaaatttcaaaacctcactacatgaagcgcgactctgttgaatattttttagaaggtaattaatttcaaacaaaacgagagctgtagggatatttaacatatcaacgcacctgaataataactataaagaatagctcaaaaatattgatttaaagatatggaactcaacaacactgtggctattcaccctacggtgctgaagagttcatgaccatgtgttaaatttcatacctccaatttcttaacggagacgtgattcttgctcattattatttttccatgcaacagggccatattcagcatctttcgcctcttgtttttgttgttcaatcaccttggctctgaaatttttaacagaatctggagttttaaaagctccgtcaattgctctctcacctggaacctgatcgcccaactccattattagcattgcttgagtatctgggttcactagtagaagttcttttctgagctcactgttctccttaaaaatacgtcttgcttctcctctacctttggcacccattttttcaataaaattgttcactaccggttccgcatggtattcacgttgaaaatctaaacctacagctccggcggatatttccagggtatcatcacgtaattgatgtagagaactaaagtgagtagaggtgtagaaataatctggcacccctgctttaaactcgtctaatctataaggtgcggtcgcgtgcatcccttcatgaagtaacacatgtaatctattatcatcggaccctccaaaaaatttatcgtcgaaagaaatgctttttttatgatccttgtaataggcatgtaccccttgccttttagggtcatatatttttaccgctttaacaacgatgctttcatcccctatcgcttcatgtactgtcatcagagaatcaatatttcttcgcacgaactgtatatcggcatcggtgattgaactgccctcttcgtagcctaaatatgctgcaacaatgtctttacctcgacctgtcctcagcgctcctcgagccttaagcaaagtttgatccattttagataacgtatcagtcaattttagagcatctcctacgctgtagcgcgtaatcccggcgaggcctttgccatgtaaaacggttctttttaaaactcgattaaaccaactgatcgggggcgaattttgcactctggctacaggaacggtttcaactaccccaatcgttccaaagagaacattaataccaccgtctatggcagcggctaatccggcgaagcgttttgcttcggtatcgccataaatattaatattgacgcctacttccatttcaaccgcaccagccccagaagaaccaagctacctacgccaggaaggatcattgtcccaatccctgcggtaataagtacaggtttgaggttcatcagcagctggtctttaagcacctcattattggttacagtcagcgtttcggcatctttgatagtgcgttcttgcgcacgtgctgcaagccaggtaaagacatcacctttaatatcgagcgatttatagttgatgtaactttccgcccagtccccactcgccagcccctttagggcggtgtaaacacccgaataagtttgcccatcctgacgatcgtataacgaaaaatgttccagcaaactctgtcgcttgccgtcatgtcgtacctgctgtaatacccagttattgagctcctgtgaattattgaattcgacaaagctctcatcctcggtgggtttatataaaataatcctcccattaaagccgtgaatcaaaataatatctgtagcgtgatatccgtagattgaaaaactggaaacttttataactgttcttttagagtttttcttctccaattcatccatagtcataaagggcagttttcttatatcccctaatacgcccatcattacggagtcttcacccaactcagataaattattcgacttatctgccataagactaagaaatttccctttaatcaccgttctataactgctgctatttatcagccaaaaagtctttaattcttttaagaatttcttactaaaatcactttttataacaatatttagaaagtccttaggcaagatttttacttcattaacagcgccaaaataattagcctcagcaccctgattatatattccagagttaccactcagggcatcagcattgagcctgtcttctgcaccaaagttatttaataacatctgggttaacgtcgtagattctttgggatgattatggtgctcccatcctgtataactctctgatgaacttgaagaacgttcaaatcggttaaaccatgtcttatcagggtcgatattcagagaacgatattgctgattttttgagaggcttgccttgatataattcgaggcaagttcatatagcttagggtagttttcttttattttattaacagtattaagataagcctttcggtttctcgcctgggataaattttgtgcttcgtctaaaaggctttgcgttggatggggttcactgtgccggctgaccgtcatcctttcatcatcgggatcaagttcaatgaccgggtgggcattggccacactccatggccatattttttgcatcactgaatctacattattgtcgagccgactgccccatctttttccatgatccaagatctggctgagggaatcgctatatgttgaagttgagcctgctggggaggggtgagtcgggcttgtatgggcttgggaagtcggtttcttgctcacatcgacgcagcccaaggtttgagtcagcaactgaacggctgcaatcattgccgtcgctttggctgaaggcaccagctcgagatcaggcatgggtgggagggtaccctcaccgggaataatacgcgggcattgattagccagatacaattcatctttaaaatttatgattttcttatcagaggagatattctttccgctattatagacattaactttccgaaaattaaagggattaacaatttccctttccgctctattaataactctattactttcctcgagaagagctgcgcttaacatatgcaatccttacttatgttgagttagatattctaaagctaaatgtaataaaataaaaaattatcaaatttaacaaagtgatatttcataatatacttgatgaaatattgaatatactaatcattataaaaggagcgatttaagcttaaaattatgaaatcaatcgctgttgaagaaaatctaaaaatgccttattgacctcactgcgctggcgatgctgcggataaaccgcactcagcgttaatggttcaggattaaaatcctccaggaccgtcaccagcattccattatttaatgcggattcaataataaattctggcaaaagcaccagtcccagcccagccacggctgcgtctttcaatatttcgccattattactgactataggaccctgtacgtcgagcagtttgcgcttgccgtcttgcgtcagctcccagccgttctgaccttcacggccatagcgaaggcaggcatgccgcaaaagatcttccgggaccctaggcgtacctgcgcgttgaagataatccgggctaccgcaaatcaccctgtttagtacgcttaagcgacgggcaatcagcgtcgagtctgcgagtgaaccaatacggatagcgatatcaaaaccttcgccaatcacatcgacgtagcggtcgcccagctccacctgaaattgcaccgaaggatgctgtcgcaagaattcggcaatcagcggggagagaaaactcatgccaaatgacatcggaatgctgatacgaaaggagccttgtagttccagccgacgttctgacacggcctgctcggcttcctgaatatcatccaaaattttctgtgcatgttgcgaaaaaacctgcccagactctgtcaccgataacttgcgcgtattacgaatcaacaatctgacgccgagagaagcttcgagtgccgccatccgccgactcacatactgcttagacagtaacaactgctccgctgccgccgtgaaattgccagcctttattacggtaataaaaatgcgaagatcttcaatctgcatgctgtgagtctcaaagtgaacgttgcccattatcgtcaactaaaaagtgacagtgtttgtcattcaggccatctattacacaaatcagtttacgtttaatctatttctatcggatgggcaaacgcctttcctcccccataattcaggagcacattatgattgagcaaagactgtctgaacaacgcggccttggtgaccacggctggttgaaatctcgtcatactttttcattcgccggctattatgaccctaaacaggttggtttctctgacctgctggtaattaacgacgatcgtgtggcagcgtcccgcggctttggggcacacccgcacagcaacatggagatcatttcctacgttctggaaggccaactggcacataaagactcgatgggtaccggctcggtgattgttccaggcgatgtgcagctaatgagcgcaggttcaggcgtaacgcacagcgagtttaataactcgacgactgacggcgtgcattttttgcaaatctggattgtgccggcagaaaatgggaccaaaccaggttatcagcaggtctctgttgctgaagaggacaaacgcggcaagctccgactgataatatcgccgaccggtgatgacaaggctttaagcgtgcgtcaggatattaaaatatacgccgggcttttcgacggtaacgagcaggataccgtgactcttgccgagaaccgctacgcgtatatccacgttgctcgcggcagcgtgaaggtaaatggtatcgagtttaaggcaggcgacggcgcccgcgtacgtaatgaaacgtctctgacgttcaccgacggtgataaagccgaagtcctgttgtttgacctgcgcccggtagaagttaaccacccaaaccgttaattcataattaaaattaatagcatttaaggctgaggatttatcctcggccttttttatttcccaaactcactggaaaagatcggggattcatcgttttctattactctgttaaagcattacccaaatgggctcacaataaatcgcttcgatttgcttacaccgatttggataattttatgaccggtatcgaccagtctcaataccgtgcagattttaaaaaaacatcatcgaacacgatacaaatcctcaacgagccttattagcaagatctctattactgatcaaatctccgaccattcacgcaacaggttgtgatacagattcagcagcgacagtacctcttcactttcgccgtggcgcgctttcagcttctggatattgccgtcgagttcgaacagcatgccacgctttttatcatcgcgaatcatcgactgtacccacataaatgacgccactcgcgtcccctgtgtcacaggcgtgacgcaatgcaggctgctggaagggtaaagaattaaatcacccgctggcaatttgaccgagtgttgtccgtaggtgtcattaacgaccagttcgcctcctttataactttctggttcgcaaagaaaaagtgtggcggagaggtcagtacgcatccaacccgcttcaccgttgttacgcaccgcaccgtcaacgtgaaaaccgtaagtttcattctgctgatagcggttaaacagtggcgcagagatactgcgcggaagagcggcggcaaagaacagcggactgttttgcaacgccttgagaaccgcagcctgtagcacctgataaatctcgcttcgtgtatcaatctgttgattattcttcacttgagcaccctgactgccgacggtggcacgcccgtcaatccagggtgcgcgctctagctcgcgggaaaaggcagcaagctcgtcagcgtttaatactgcgggaatacgatacatcatgattgtcatctcacaggaaatcgtggggcacagggccccacgttctttttaaaacagcttagaaatgcacgttcgcagttaacaagaacgttctttcttcgcccggatggtagcgatatccgctcttgttgatcgatgcaacgtagtctttgttgaagatgttataaacgttgagctgaatatcaaggttgcggttcacgcgatagccggccttcgcatcagcgacccagtaaccttcggtataagaaggtgtccccaccgcaccatcggtgccacggcttaagccgccaacatagcgtgcgccgccgccaacggaccagtcatcgctgacctgatattggttccacagggtaaacgcatgtttaggcgtgtaaggcagagacgacgagccttccgcggtctcgatagcccttggcgaaccgaggcatgctgctgggtgtaacccgctatcacctgccagtccgttgtaatattgccgctcgccgacagctcgtagccctctacgcgcttggtgccatattgcgaataggtaccgtcgtcgttagcttcaacgtcgttttcaatatcagtacggaacacggcggcggaaagcagcagacgtttatccatcacttcccacttggtgccaatttcagtggttctagccttttgaggtttgaaatcggtgcggttggcgctgttgcccgtcccgctggcggccagcgcgaaggtgctgccacccggaggctgctgagaaattgcatagttggcgtaaaggttgccattttcggtcagatgataaagtgcaccgaccttccagttaaccaggttgcccgacttattggtattcacggtcgtaatcggcgtattttttggcaccccggcagggcaggccaacgcaccgcgccccgttgagccgcaggcagtcgcgctgtcgtaggaggtgtgatagctgtcgagacgaacgccgccgttaatttcaaatgtacgggtaatctgcagggtatcaaaagcataaatcccggcggtatcggtggtgccattggcattcgcaccattgcgcgtcaggccaccgatgctgatatcgctattaggatgataaatattggccgctggcagcgtcagcgcattaacgccgtagttggtctgctgctcgcgggtaaattcaaccccggcgctgacgtcgtgaccgatagaaccggtctggaacttagaggtgatattggtctggttggtcagaatcttgttgctgacgtctttggtattcgccacacggccgagcgaccagctgccaacgtcgctgttaggacgggtgatattggaatccgccgccataaatgcgctaagcagatagtcctgcttgatctgcgaccagcgagtggtgttgcggatagtggtgttttccgaaaggtcatgctcgaatcgcatcgtgacggtatcggtggttgaatcgtcgtaatcggaattagtgccgtagaaattatgcgtgttgaccttgcccgaggaattcagcgccgaagtcgccgccgacggagcagaataacctggtaatccgatagtcggcacaccgccgtctggcgtgttgtgctgggtaacatgcagataattcaggtaaagacggttggaggttcccaggccaaaagccagagaaggcgcaatgccgtaacgttcgttctgcaccttgtcacggcttgcgtcatgcgttttctcgcccatcaggttcaggcggaatgccgtcgtgtcgttgagcatctgattgtaatccagcgtgctgcggcggaaccaggcgcttcccacgctgacagacgcatcgaggccgttatccatgcgcggctgtttgcttatcatgttgatagagcccgttggcgcactgcggccatagtcggtacccgacggccctttgatgacctcaacctgctcggtgttaaaggtatcgcgcgagacgctgccgatgtcgcgaattccgtcaacatagatactgttagaggtatcgacgccgcgcatatacaccgcgtcaccggttgatgaactgccgttttcacccgcgtagaaagccccgactcccggcacgtttttcaaggcatcggtcaggttattaacccctgatcgttcagaacttgtttaggaataaccgtgatggtgcgcgtggtatccaccagcggtcgggtgaattttggatctgcggactgccctggagcgtaaagagaaggtgcctgagcttcaatgaccagcgtgtcatcctgttttttttctgcattatcagcagcctgagcgtaagcaggagctgaaatacccaaacataaaccggtgaataacgtgagtgagttgaagctggtaaacggcaaggtgaggtgcttttccattttcttatttatatttcttcgttttaaaagttattagttacccagagcatcgatgtctgctgagacacccatgcaggaacccgccgcctgaataaacaccctcaggaaaacagcgggttgccctagctggcttagacgctataaatgataaagataatagttatcatttatgttcttatttttatcacgaaaaacagacaaaaagaatacactgcattacggaatgcttacattacgtacatcttttgtcttaaattactctgagagttccctgatgagggctgtggcagggtagaaagctgggtttatcggccagctttcctggaaaagagattagataagatttgagatttctatcagattaaaatcagggtcgcggatgtaaaccgaaaggattgccccctgggcgccggtgcgttcgaccggcccttcttcaatcacgacctcatgagcaatcagctctgctattacctcatccaagggcgttgcgctgataaagcacaggtctgccgatcctggtgtcggagcctgtgctttaggctcaaactcttttccgcgctgatgaagatttattttttgccgaccaaaggttagcgcctgacgagaacctttgaaggtcacgacttcaaaacccaatatctgatggtaaaacgcgatagtgctatcgatatctgccacggtcagtaccagatgatccagattttcaattttcatgccaggggatcctcactgtttgtaatccttgtatttaaatcagttagcctctttaggtgtaaaccagtatcgccctaaaatcttccttcatccttttttcatagccagaaacactgaccatactcactatgcagcattttttatcggggtatcggtgggcagaatggggtatcatttgttcaatgttttttgatcaacaaaccatcgctaacttctcacgctgattacttcaatgacccttaatacgcacttcccgcttcagcctgtttttgacggtcataatgaccttttgctgcgcctttggctgaacgaggcatccgaccccgtttcaacctttttaaacggttcgccagagggtcatctcgatctgccgcggagtcgtcagggcggatttgccggtggcctgttcgcggtattcattccgccagcctcctacatgccgaagctgaaaccgcatgcggcgcagcaaccccacgatccgctggcaataacgcatcagcaaatcagtctgctacagcgtattgagcgtcaatctaacggtcaggcgaagatttgtcgtaccgcgggcgaaattgaaagctgcatcgaacagggcgtgttggcgatggtgctgcacatcgaaggggccgaggcaattgacgtttcactcggcaatctggacgaattttatcaggcgggtttgcgcagtatcggtccgttatggaatctaccgaatcagtttggcgtcggcgtgaccggcgatttccccggatccccagacagcggtgatggcctgacgctggccggtctcggtctgctgcgcgcctgcaatcggaaaagaatcctgattgacgtctcgcatatgaatgagaaggcgttctggcagacagcgcgattcagcgatgccccgctggttgccacacactccaacgcacatgccctttgcgctcaaccacgcaatctgaccgacaaacagctggccgcgatcgctgaaagtgacggttttgttggcgtcaattttggcaacgccttcctgcgagcggacggcaaacgcgacgccgacacgccaatcgaccgtatcgtacaacacattgagtatctgctggaaaaactcggagaagaccgagtgggtctgggttcagactttgacggtatcagtgttcctgaagcgttaggtgatgttaaaggtctgccattactgttacaagccatgaaacatgcaggttacagtaatgcactaattgagaaactagcctgtcgcaactggttaaaagtattaaagcaaacttggggtaaataacctcttttcggctttatagggcgctttcagagccttccccatacagtttgtgtggttgatatcacataagcttaggaggaacatctgcggcgccaaattttctaatatttgacaacgaacacttcatctgccggaattaatactggcatgatgtttttttaacctgcaacaccacgaggagttgaccatgaccacttggactaaacctaaatttgtagatctgcgtctgggcttagaagttacgctgtacatctctaaccgctaatccctcttgcccgcagttcgctgcgggcattttctttttttcttcttttcctggtctacacatgctgattaacgttcttggttccgctgcgggcggtggcttcccacagtggaactgcaactgcaacaactgtcagggcgtacgcaacggcaccatgaaaacctcggcacgtacgcaatcctcgattgctatcagtgatgacggtattgattgggtgctttgtaacgcctctcctgacgtctgccatcagattgccgccacgccagacctgattaaacacggtgtgctgcgcggtacggctattggctcaataattcttacggatagccagattgaccacagcgcaggtttgctgaatctgcgtgaaggctgtccgcatcaggtatggtgcacgcctgaggtccatcaggacctgaccaccggtttcccggtatttaccatgctgtcccattggaacggcggactggtgcaccacgcgattgaccccgaccagtccttctccactgcggtgtgtccggcgctgaaatttaccgctattccgttgctaagcaatgcaccgccgtattctgaataccgcggaaagccgctgccgggccataatatcgcgctatttattgaagatacccgcaccggaaaaacgttgatgtatgcacccggtctgggagaaccagacgacgcgctgatgggttggctcaagaaggccgactgcctgcttatcgacggcacgctgtggcgcgacaacgagctggccaataccggcgtgggccgcaacaccggcaaagacatgggtcacctggcgctggccgagaaacaaggtctgatggacctgctctcctcgctgcccgccgagcgtaaaatccttattcatatcaataacaccaacccaatcctcgatgagtcctccgccgagcgtaatgcgctgaccgagcaaggcattgaggtcagctgggacggcatgcgtatcgagctttaggaaaccgttaatgaactcatttaatgcctctgcggcgctgatgacgccagaagagtttgaacaggccctgcgcgccaagggtgcctactatcatattcaccatccttatcatatcgccatgcacaacggccaggccacgcgtgagcagattcagggatgggtcgcaaaccgtttttattatcagaccagtattccgatgaaagacgcggccatcatggcaaactgcccggatgcacagacccgccgcaagtgggtacagcgaattctggaccacgacgggcaaggcgacagcgaaggcggcattgaagcctggctgcaactcggtgaggccgtaggccttgagcgcgacgtgctgctatcagaagaaagggtgttgccgggcgtacgtttcgccgttgatgcctacgtcaactttgcccgccgcgcagtgtggcaggaagcggcctgtagctcgctgaccgagctgtttgcgccacagattcaccagtcgcgcctcgacagctggccgaaccactatcagtggatccagcctgagggctatcactatttccgcagccgactgagccaagcgaaccgcgacgtagagcacggtttagcgttagcgctggagtactgtaatactgttgagaagcagcagcgtatgctggaaattctgcagttcaagctggacattctgtggaccatgctcgactcaatgaccatggcctatgagcttaaccgcgcgccttaccacagcgtaacgcagcagccggtgtggcatagagggaagcttctgtgatcgaaattaacgtcaatcaggtgccgatgttccgtcgtggtttccgtttacagtgggaaccgacccagaacagccacgtgatcctttaccctgaaggcatggcaacacttaacgaaagcgcagcgatgattttagaaaacgtcgacggtaaacgtcagctgtctgaaatcattgatgggctaaatcaacgcttcccggaagcgggcggcgttgacgaagacgtgaaagagttttttgcccaagcctacgaacaaaagtggataattttccgtgaacctgcctaaaccccaagtcaaaccgccgctctggttgctggcggagctgacttaccgttgtccgttgcagtgtccctactgctccaatccgcttgattttgccaagcaggaaaaagagctgaccaccgaacaatggattacggtgtttgaacaggcccgcgagatgggcgctgtacagataggtttctccggcggtgaaccgctggtgcgcaaggacttgcctgaacttattaaggcagcacgcgatctcggtttctataccaatctgataacctcaggcattggcttaaccgagaagaagatcgacgcctttgccgaagcaggtctggaccacattcagataagcttccaggcaagcgacgagacgctgaacgccgcgctagcaggctctgccaaggctttccagcagaagctggacatggcaaaagcggtcaaagcccacggttatccgatggtgctgaacttcgtgctgcatcgccacaatattcatcagatcgacaaaatcatcgaactcagcattgagcttgaggccgacgacgtcgagctggcgacctgccagttttacggctgggcgcagttgaaccgtgaaggcctgctgccgacgcgccagcaaatcgctgatgcagaagccgtcgtcgccgattatcgcgtgaagatggccgacaaaggcaatcttgccaacctgttgttcgtgacgcccgactattatgaagagcgcccgaaaggctgcatgggggttggggctcgattttcctcagcgtcacgccagagggtatggccctgccttgccacagcgcgcgtcagctgccggtggagttcccttcggtgctcgaacgatcgctgcaggacatctggtacaactcgtttgggtttaacaagtatcgtggcttcgactggatgccggagccttgccgctcctgttcggaaaaggaaaaagacttcggtggctgccgctgtcaggcctttatgctgaccggcaatgcagataatactgatccggtgtgctccaagtcgccacatcacggcaagattctggaggcgcgcgagcaggccaactgcaccaatattcaggtcagtcagctccagttccgcaaccgccaaaactcccagcagctgatcttcaagacgccggtagcctgatatgcagcaacggcagcggctggcgaacggcctgtgggtcacgttgactcatgacccgcaggcgtcacgcgcggccgcgctgtttcatctggccgccggtagccatcacgaacccgagcagtggcctggattagcgcatctgcacgagcacgtggtctttgccggtagccagcattatcagggtgaccagcggttgatgggctgggcgcaggccgaaggcgcacgcctcaacgccaccacgctgccgaccgctaccgcctggttttttgatatccctgcggccaagctggaagacggttttgcccgtatggtcgatatgctggcgcagccgttgctctctcgagaagctgttgcgcaggaaatcaccgtcattgacgccgaatatcggatgctcaccacggatgctgagaccttatgcgaggcggcgctgggtgccgcgttcgattccccgccgcactggcgcggtttcacgtcggtacgcttgcgcactttggcgatgatatcgacgctctccagcatgctttgcgtgactatcagcagcgcttctttcataccggcaatttatcgcttcagctcttagggccgcagcccattgaggagttggcggcgctggccgaacgttatgcgggcatattgcctgccgccgacggcgcggctgtgccaaagaccgaacccttgagaattaacgccgcgcagaccttcgcgctgcgtaatgaaggcgcacctcgcttgcacctgtctttcgggctagaaaatattcatcgcgccaatgcttcctcgcttaccctgctgcgtcagcttgcaaccgacgaggcagagcataacctgctggccgcgcttcgcgagcagggatgttgcgataacgcgcagctagtattgccgtacagcagcgataatgggtctatcgtcacttttgaatttatgctcacggggacccttcggcctgccgccacgcagactgaaacgattttcgctcactggctgggcacgctgtcttccttgagtccccccagctacagcactacgccggtctcgctacgcaggagtttgcccgcttgacgccggttgataagctgcgcaccaccgcattcggtttccctcccgtcgatgccgcgaataccgcgcttgtcagcgactggcagcagctactgaaccagcttgttgccagcaatatgactcgattatgggtaacccccgacattacggcagaaaaccggaatattcagggattttcactgcctttggcgacaattcctgactggtctaccgaaatttcagcgccgccaacgctggccttttatccccttggcgatcgacgttcggctccagtgctgcccgcggagtccgttcaacttgcgcatcatcagagtgataacgaaaatggggtgttgatcctcagccctgcccagggtgaggcattgccgctgcgctgggccaatattcttcaggccagcctgcgcgccattgccgcaggctgtgcccacgcgggcggcaacctgtcctttgagcgccatcagggccaatggctgttgctgctcagcggcgataacgggctaatggtcaataccctcgataacctgctgacccgactctcagccctgcccgcaacgctgcgtgcacaaggagaaaggcaggccgttcaggcccggcaagcgctgcaaaccgatatcgccatccgctgcctgctgaaccagttgccacggctgttgtccggcgagctgccagaggcagatttcgaggcaaataagggcgctgaaaacgagagtgaacgtgacgacgataatggcgttgaaacgctgccaaggcttagctggaatgccgcgctgtatggcggagacgccgagctgcaaacggcgctatcgcatctgttgagccattttcctggcaagataaacgcgcgacattttgcggtcactgcgccacagccagcacggccagagtatcgcttccccacccagggtgaagatgccgccgtactgctgttttgcccgctggttgaatcaaccgcgtcctgcctcgcggcgtggcagattatggcttcactgttcgagccgttgttcttccaacgactgcgggtcgaaaaaaacatcggttacgtggttacctgccgctttatgcagacggcgggcgagagcggtatactgtttgcggtgcagtcgccgagccatacccgcgaacagataatgactgaaataaggcaattcatcgaggaaatggcgacaaatatcgcccatattgccgacgatgtgttagttgaaaaaaccactgcgctgattgaaaatcttcaaactaccccgcaggacaagcaacaacaggcgcgcgatcgctggctagcccagcacactttctcccctgcactcactcccgagaccgttccgcgcctcacgcggctacagctccagcacttccaccgacagctttgtgagcaacaagcgcgatggtggcggctgacaaataccccgcattccctctgaatattcaataaaactgaccgaaccggtcaaaagtttgcggttgttatgtgaccaatctggggtgaggatgtatctttaactcatcaactgtccaacgttgtggagcatctcgtgggattactaagtaaattcttcgcgaagttattgggtactgattcgacacctacgcccctaaaagaggaaccaaagatgactaaagttctggtactttatcattcaatgtatggtcacatagaaactatggcgcagaacgttgcagagggtgcaaaaagcgttgctggcgttgaagttacgcttaaacgcgtgcctgaagtgatggatgcggaatcctttgcagcagccggtggtaaagcagatcaggcggctcctgtcgccgacccgtcagagttggctgattacgatgccatcattctcggcaccccgactcgctttggtaatatgtccgggcagatgcgtaacttcctcgacagaaccggcggtctgtgggccaaaggggcactggttggcaaagtcgccagcgttttcacctctaccggcaccggtggcggccaggagatgaccattacctccacctggaccacgctggcacaccacggcatgattatcgttcccatcggctacagcaccggtgagttgttcgatatttctcaagtcggcggcggcacgccttacggtgcgtcgaccatagccggcggcgacggatctcgtcagcccgacacccgcgaactggccattgcccgtcatcagggccaatatgtcgcgcaaattgccgcgaaactcaaggcttaacgcccgatagactcaggcaaagcgccgtctttgcctgagcattctccccgtcaagttctccagttctgaatatctcccggaccttcctcacagattacgaaaacaacgtcggtgaattcgaggttttgaaaaactctgtgcaccacctcatagtcaattggatgctttcataaactttatttatttctcgccgttatttttcaacataagcacaatgaccccattctgaccgccatcctatatttgatacgtcagcgaacttgccttttaaaattaaaaggaaaataaaatggtatggtcgaaaaagggtcctgagaaaaaatcctacgtccgcataggaattttattaatgattttgtttttatcggtcgtagcctatgcggatcgttctattttatcgatatcagggtcggcgattaaagacgagtttggcctctcatctattcaacttggttttattctttccgctttcagctgggcctatgtcataggacaaattccgggtgggctgtttctcgaccgctttggcgcgaagcgagtctatggcgtcacgctggtgctctggtcgctctccacgctggcgatgggcttcgtcggcgagtttgagcgtggcatggccagcgcgttaatgattatgttcagcctgcggtttttacttggactgatcgaggcaccgagcttccccgccaatgctcgcgtcaccattatgtggttcccaaaggccgagcgcggcagagcgtcttcgctgttcgcttcgtcgcaatattttgccgtcgcgatattctcaccgctttccggttggctggtgtcagaattcggctggcagtggccgttcttcgtattaggcattattggcgttgccgccttctttgtctggatggcatttatgcgtgagccgcgccatcaccctttagtgtcgcagcaggagttggatcatattattgacggcggcggtctggttgatattgattccgttcatgagcgtaaagccaaatcacgtttatcgcgcgcaaccgttaatggactgttgaccaacagaatgctgtggtgcgcctacctcggccaatattgcattatcgcgctgagctatttctttattacctggttccccatttatctggtgcaggcccgcggcatggatatattgcacgccggatttgccaccatcgcccctgcactctgcggttttgcaggcggaatcttcggcggatatatctccgactacctgctcctcaaaggttggtcgctctcctgggcgcgtaaggccccttatattgtcggcatgctgatggccgcaacgctcatcggtgccgccgtcattgacagcaatgtctggattgttgccatcatgtcattcgccttcttcggcaaaggcgtggcggcaggcgcgggacctggaccgtcattagcgacactgcgccaaaagaggccgtcgggctggccggtgccatcttcaattgcgtaggcaatattgccggaatagtcacgcccattctgtttggctatatcgttgccatcacaggtgattacagcatgggcctgttgttcgtcggcgcacactgcatcctcggtgccctgctgttcctgttcgtaatggggcctatcgaacgtgtccgcaaagaccctaccgatgcagccctcgaaaaaagcgtcgcgttcaaggccgggcacccgctgtctcgctgaaacgcagacccatacccaaaaagccagattgcctaagcgtctggctttttaattttccgtactggtgtcattattattgcctactccttcttgcactccatcggggaaaatttatgtcgttaacgtcccttgagcatctcggtgagctgcccgccgagcagtgggatgcgctggttcctgccgggcaacctttcctgcgacacgcatttctgaccgcgctggaagacagcggcaccttcgggccaagatcgggctggaagagccagcatctcttatggcaggaaaacggcaagacgctggccgcggttccggggtatcgtaaatcaaactcttcgggtgaatacgttttcgaccatgcctgggccgacgcctgctatcgtgcaagaatcccctattatcccaaatggctcggtgcggcgccttttagcccggtcggcggacgtcgactgctgggcgcacacgatgcagcccagaagctgttgcgcgccgttcccaattttctggaacagcatgatttctccggcgcacacatcaattttaccgacccgcgagataatgagctgatggccggcgagtccgaatggttgcaccgccttggctgccagtatcattggcacaaccgcggctatcgtgattttcaggatttcctcgacacgctgacctcacgtaaacgcaagcagatgcgcaaggagcgcgagcaggttacggcgcagggctttgaatttacctggctgaaggggcagaggtcacagaagcgcagtgggactttatttacgcctgctatgccaacacttatcacgtgcgcgggcaatcgccttacctcaggcgcgatttcttcagtctgctggccgagcgtatgccagaggatatccgcgtggtattggccacgcagggcggccagacggtagcgatggctttcagtctggtcagcggcgacactttctatggccgatactggggttgcctggcggaatttgaccggctgcactttgagacctgcttctatcagggcatggactacgcgattgccaacgggctggcgcgtttcgatgcgggggcgcaaggtgagcacaagcttattcgcggatttgaaccggtgctgacgcactcctggcactatttacgccatcccggactgcgcgacgcggttgaagagtatcttgggcaagagcgggaaggcgtgcgcgcctgggccattgaagcacgagacgcgctgccttatcgtcagccacagccttaggcgattagtggccgacaaaaccgccggtttgatgctgccacaggcgtgcataaagaccgttctgcgccaacagttcaccgtggctgccaatctcgacaatctgccctttatccagcaccaccaggcggtccatcttggcaatggtcgacagccggtgggcaatagcaatcaccgtcttgtgggtcatcagcgtttccagactctcttgaatagccgcctcgacttcggagtcgagcgccgacgtcgcttcgtccatgataagaatcggcgcattcttcagcagtacgcgagcgatggcgatacgctgacgctgtccgccagaaagtttcaccccacgctcaccgacgtgcgcgtccagtcccgttctgccctgcgggtcagaaagctgcgggataaactcatcggcacgcgcctgacgaatggctcggttaagctcctcgtcgctggcgttagggcgaccatacaacaggttatcgcgaatagaacggtgcaatagcgaggtgtcctgcgtaatcatcccgatttgcgcacgcaggctctcctgcgtaacttcggcgatgtcctgttgatcgataagtatcctgccaccatcaaggtcatacagtcggagcaacaggttaaccagcgtcgatttgccggcgccggacggtccaatcagcccaattttctcacccggacgaatggctaaatccagtccggtgatgacgctgcgttctttgccgtagttgaaggttacgtggtcaaagtgaatcgcaccgtggttgaccttaagccttggtgcctgcggcttatcggtcacggcaatcggctgggcgatagtttgcaggccgtcctgcaccatgccgatattctcgaaaatgccgttcaccacccacataatccagcccgacatattgacgatacggataaccaaaccggtcgccagcgcaatggccccgacgctaatcagcgattgggtccacagccacagcgcaaggccggtggtgccgacaatcagtaggccattaagggtggttatcgctacgtccatgctggtcaccagacggcttgccagctgggttttctcggtctgctcgctgatggcttcgcgggcgtattcctgctcgagatcggtatgagcaaacagtttgagcgtcgtgatattggtgtaaccgtcaacgatggtccccatcaacttggaacgcgcctcggaggaaaccaccgaccgcgccttgacgcgaggaacgaagaaccacaggcacaggctgtagagcacaatccaggcaatgagtgggatcatcagatgccagtcggcttcggcaaacagcaccagcgcactgacggcataaataaccacgtgccagatggcatccaccgcctgcaccgcagaatcccgcagcgagttgccggtttgcataatgcgttgtgcgatacgtccggcaaaatcattctggaagaagttcaggctctgccgcagcacgtaattatggttctgccagcggatcaggctggtcatgcccggactgatggtctggtgcaccagcaggtcatgcagtccgataaaaatgggccgcatgatgagggccactgccgccatccacagcagttccccggcgtgcacgctgaagaaactgccggccggcgtggaacgggtcaggtcgataatcgtgctgaggtaactaaacagcgatacctcgatcagtgacccaatcaggccgacgatcagcagtgcgataaagctgggccaaacctgacgcagataataaaagtaaaagggccaaacctggttgggtgccgccgcattaggcggagctttaaaaacatcaatcaaccgttcaaaacgacggaacaacatacacgcctctcatatcctggagtaataaaatctagctatagaatttagctttggaatgggtagtcgagggctgtatcgccccggtccaataatgaaattgctataaaaacaaagcttagtgcattttgtggaatgtttgcgggcagagttgtctgcaaaaaaaaagaagccatggggtacatggcttctctaaagcaagagaaaggggcaacaggttaggttttggcaatatctttcaacggtgctttgcgcgcgagcggccgcaaggatttgataattctcttctcaagaagtttgtagcacaggatgccgatgataacggaaacgatgaatgacactaccaccaaaaccggaaccgagaccctcgattttatgaggatgaatacaatccccaaagaataaaggtgcgtcaggtagattgaataagaagagtcaccaatcacctgcgccaacttgataatcccgccctcttgtctaactttcttttcaagcaacaggaagacacagaacaatgccagtgccggaataccgtaatacaggcttcttatctcgctatgccataccaccggcgtggccgatagaataaggcatgccgccgcaataaccattatggctttggtattcttgctcgtcaccagataggcgattatcatgccatagatgaactctagggtaatcggatcgctgataaatggaatcttgaatatctgaccgataacaactagtacggcaatcgcaaccgatgagaacaatatgcggtttactttaagcttaatcgccatgtagtagatgacgtagaaaaacatttcgaagctaagcgtccaggcaacaattaataaaggtgaggtgcccggaacagggaaaagtgtaaaggagttccacattgagataggaacttcaacgtgctgatttatcattccaggacgaatataagatattactaacgtaacaagagtaataacccaatatagaggatatattctgaaaattctctttttcataaattcatttgcgctgaattcatgtaccgaagagtagtaaatgataaaccctgaaataataaagaaaatatcaacacctgcggcgccaagctcaaagctccatttaatatcgccatttacatataacttttgagttatatggtatacgatgaccatcatcgcagcaatgccgcgtagaatctgaaccgatatcattttttccctgctagacaatatggttgttgcttaaaccataccagataatatgtagatcgggtgtttttttttaccctaccaaagaggggtgagatgcccagatttatagcgttatagccctcctccataaggcagtcgaggtgtcttccccacgaaaaacagcccttaaggctgtgcacaccctcaatccttctccggttgttattagtgaagctttagttaaaaatttacgaatccttgcggtcccccaacgatcatggttagatagataataaggccatttttcaagaaatactgacgtggtttcttcgcaaactggttagtcaactcactgtgtcaaaagggtaaaatttcaggggggcactttctaagctcgcccgaaaacgcaggagatgagccaaaacgttcacatgtttacaatgtgaaaccctttatatgggggtctgcagttgtcaaggtgacaagtgcatctatgattgatgaatatcatagtgccaagcatcccctttttgggagggatgacagagtcatggggcatctggagttgatatttcttaagggataacatgcaaatccataaatcgtcgcttattaagcttaccattttcctcttaacgctaagaagtcccttaattataccggttattgttatctacacgcttgcagagcgtgggatgtttaagaaaatggtattgaggatgatcccctttatcctctttatcgttgtaatggcgctgtattcgctaaatctaatcaacggattaaagtcggggccagacgtctttggccagtgcagggatatactcctcgcaatggtcgtatttacctttttagtgtcggcaagtgagatagatgacaagaaccccgccatcgtctacaacagcctgaagttctgtcttaccatggtgggtatcgccaaggcgctggctattgttttcgtcggcgtgacggggatgagtgccaaggtccttattacttacatgaacagccattttggtctcggcatgatgaccctcggcgttgatgacagtgctttcttccgtctgcaaataccgctcgactcgctggttccgctatttatttacttcatcgtgaaagaagctgtaaataagtcaggaagcaaactgcttatttatttcatcttattgtctctctgcttctcgatgctggttaccatgtcaagggtagtatgggcacagactttagtcattatcgctcttgcactcgttaaagaggcaaaggtttataccatgttcaaggtaatcacgatcggcaccgtactgattaccatattatatatgtttaccccggtgggagatgcgataacgcagatcgttaacgttcgtcttggcaccaaatcttcaagcctgaatgcagactccgatattcagagggcattgcagaataacggtctatacgatgcctttattcattatcctctgttaggtaacggtttaggatattatctgccgggcattatacgttctcaagatgctaaatatctctatgaaagccagagcctctctattctgatgaaccttgggattattggtacgattatattcctggcattagtcgtttatacctgtttcatgtccgcactcaaagatggtggcggacttgggatgccttctctattcatccttttctggatattctccggtacgtttaacccattcttattcggggtagcaggaggcgggatgctctttatggcggccaaattccataccttctaccggccaagctatgaggaaccggtggcctctgcaacccgggcggcacgaatgcgatccgcctagcgataggcgttccaatgtgggtgagttttatcatgaaactcacccactttcattttattaaccccccatccgtttatctttttttcctttcctcgctatcaaaaagtgcgccggtcatcacgcaaactcacggagtatggtataaaaagcgctcagctttttaacggcattaaccacatgaaaaacaatagtatttacacgcctgcgcagccggttgcggcgcagaagcgcgtgctcggctggcgcgatctgttctcgctctggttttcactcgggatgggtctcatggttttgcaggccggtgcgattctcgcccctggcctgggtatggcgggttcgctgctggctatttttaccggcacgctggtcggcgtgattttgcttgcgctggtcggtgtgattggtggacaaaccggcctttcatcaatgtcttccctgagcctgagcctcgggaaaagaggcatcgccctgcctgcactgtttaatatcttgcagcttattggttggggcgcttttgaaattatcgtcatgcgtgacgccgcgagcttgcttgccaaacaggcctgggggccgcaaagcctgtgggcaaatccgacgctgtggacgtgggttttcggcttcctcgccacgctgctagccgtgtgcgggccgttggcgttcattcgcgtcgtgctgcgccgctggggcatctggctgctgattgccagctgcgcatggctgagcgtaaacctcatccagcatacgtcgctcaccgcactgtggcataaggctggagacggcagcatgccgtttgcgttggcctgcgatattgtcgtgtcgatggcgctgtcctggctaccgctggtgtctgactacacccgttttggcaaaacctcacgccagaacttccttggcaccgcctgcggcttcttcctgggcagtctgtggatgatggcgctgggcgcggcctacacgctggccttcgtcagctctcaggacagcaatgcgctgctgctggcattgtcgggggtcgcgctgggtattccgctgctgctcatcctgatcgacgagcacgagaatacctttgccgacattcactcagccgcgctctcgaccggcacactgctgccgataaacatcggcaagctgagctgggctatcggcctgatttgtacgctgattgcctgggggttccacttgaccgctacgagaatttcctgctgctgattgggtcagtgtttgcgccgttgtttggcgtcgtgctgatggactacttcgtgcttcgccgtcgtgagccgtctacccgcagtctggacggacgcgcgctggccgcctggatccttggtattgcgacctatcatctgatagcacagttttaccctaacctgggtgcgacggtgccgtcgctgctgattgcggcgctgttctgctggttgttcagcaagcgtcgctgagggaacttaacgtttgcagcgccgacttttgcgcattggcgacgtgatggcgtgcggcattctctgccgcatcaccgtcacgcgccttgatagcctgaaagaccgcgtctatctcgcgcagactctcgggcaagcggtctcgttgcagcagtgaggtggcacggagcagattgactcgcgaatgcagcgtggtcagcgactccgtcaccagctcgttgccacagtgcgccaacataatgccataaaccgcatttttggcctgtagcactgtggccctgtcttcactaagactcaccttgcgtaattgcgctatcgcagcggctaacgccaggatgtctgcttcactggccgactgagaaaattcgcgggcaataaagccctcgagcaggccgcgcatggcgtacagatcggcggcctcttttaacgacaggctggccacgatcgggcctttgtgtggcaggatattcaccagtttttcggcttcgagttttcgtaatgcttcacgaatcgaggtgcgactgaccccgagcttctcacaaagctcgcgctcgacaagccgttctcccggcgcaaaatgcccgttcacgatcgcctgccgtaatacattttctacctgaaaacgcagcgtttcggctcgcaccaggccaatttcagaagacatcatggagttccagtccaacgcaacgcgtgcttaacgcagcgccgagtagtcagtcggtgacaagaaatggttttcgattcgctcaacgatcggctgttctgcctcggtggcgagacgtttagctaaccactcctgatcggactggaaggcgttccacttctgctcacgctcggccagactttcccattgcagcatgtaggtcagcgcatggttgcttgtaccgacaaccgtggtccagaaaccaatttgtttgatgccgtatttatcgaaaaatgccagcgtgatgtttctaaaacggtcatgcaacgccggcaagcgacctggcgcacagtggtaaatccgcatctctacgatcatgttttttctcctgaatgagtgagcctgaggtcggcccttcgacctcctaatatatacaccaggaaagacccgctttcgctgcaaaatagtgtcaaagtgcgttggcagccaatatctcttgcctcgatgtagcgaaatacggtttatttaaaccctcgttttaatcacagcggcaatgacaattaaggaaatcagcatgcgtattctggtagtgggagccggggcaacgggaggatttttcggcggacgtctggcacaggcaggcagagacgtgacgtttctggtgcgcgagaagcgtggggagacgctgaaaaaaagcgggctgaacattcatacccctcagggtattacctgcgtacaacccaagctggtgctggcctcagagctgaaagacacctttgacgtggttatcctgacggtgaaaggtttttcccttgaggcggtcatggaggagttcgctccggccgtcggcgagcagacgctgattttaccggtgctgaacggcatgcatcatctggaaaagattcagcaaagattcggaaagcatagggcaatcggtggactttgcagaatcaacgccactctggatgccgaaggtcaggtacaccagatgacagcgctcgacgagctcatctatggcgaagttgacggtgaacgttcagaacgcattgtgaagctggatgacctattacaaaacgccgggtttacggcgcggctatcgcgccatattgtcagcgagatgtgggaaaaatggctgttcctggcaagcgtgggcggtattacctgcctgatgcgcggcaatatggggcaagtcagccgtgcggcgggaggaccggcgtttatttcggcgttcgtcgaggaggtggtcgctatcgtggtcgcaggcggttaccgggaacgcccgcacgttaagctaaatactatcaaagagttgactaatgaaaactcgacacagacgacctcgatgtaccgcgatatgactcagggtctgccggttgaggccgaacaaatcctcggttctctggtctcgatcgctgaaaaagccggattaaacacgccactggtcaacgccgcctatacgcatatgtctgtttatcaggaaaatatcaggaaataaccaaccgggaggggaagtgacgtggaatacacgcccctcgaaaagggggcgtgtaagaacgaagagattaggaggtgaattcttcctgctctgcctcttcttcctgcacgtgaaccacaggctgaacgacaacggcaggtttaaccgcttcgatttccaactgcagaacgcgactggtgcgatccatttcacgcttcgccaactcaacgttaccgttcagcttctggccgtaagaagggatcatctctttaagcttgctctgccattctgacgtcgccactttgtctttaaagacacgctccatcagctcaagcatgattggcgcagcggtagaagcacccggtgaagcgccaagcagtgcggcaatcgagccgtcctgcgaggtgacaacttcagtaccgaggcgcagtacaccgccctgcttgccatctttctcgataatctgcacccgttgaccggcaaccacgagacgccagtcctgttttttggcatccgggaaatactctttcagcgcagccagacgctgttcttcggtcagcatcacctgattaatcaggtatttgaccagatcaaagttgtcgaggccaacgcgcaccatcgggaagatgttgtgcaggttaacggtgccaaacagatcccagagcgagccatttttcaggaacttgctcgagaaggtggcgaaaggtccgaacagcaagacttttttgccgtcgagcacgcgggtatccaggtgcggcaccgacattggcggtgcgcccacggacgccttgccgtaaaccttggcctgatggcgtttaacgatttctgggttatcggtcaccaggaactcgccgccgaccgggaagccgccgtagcgtgaagcctctggaatacctgatttttgcagcagcgtcagggacgcaccaccggcaccgataaagataaagcgggttgttacgctgtgttcgcggccacctttctttgagaaggtcacggtccaggttttatccgcattacgtttaatgttcttaacttcatggccgagattcaggctgaagtttggttttttacgcagagattcaaccaactgatgggtgattgcgccaaagttgacgtcggtgccgctttcgatgcgggtcgccgccactttctctttagggtcgcggccttccagcaccagcgggatccatttttcgatctgtgcgcggtcttccgagaattccatgccgcggaacagcgtgctggtttgcagcgccgcatggcgtttacgcaggaattcgacgtttttctcgccccagacgaagctcatgtgcggcacgctggtgatgaacgagcggggttcaccgagcactttcttctcgacctgataggaccagaactgtcgagaaatctggaaggcctcgttaatctcaaccgccttggcgatttcaaccgaaccgtcggctttctcagggtatagttcatctcggccagcgccgagtggcctgtaccggcgttattccatccgttggaactttcgtcagccacgctgtccagtcgctcatacatattaatcgaccagtcaggctccagttcctggagatacgtgcctaaggtcgcgctcataattccgccaccgatcaggacaacatcaacgattttattttccgccgctgccgcgtgtttagacagcgccatcaggcccatgcctagagcactggatagtcgatttttcatgattcacttctcacttttagctaaagcaggtgaaaaacccaacgttccttgtgaccaaggcggcttcgtctcttctcaataccgggagtattcaaaagcggccagtgttttccacactaatctagtggttatttttaacaaaaaataccaatctacgtaactaacataacatttttgccacttacgcgataataaatttaataattcaaatattatgataatggcatagttatgggaaaaaattaaccagttattcacgtaaaacgtttccgaaaacaggacaaaaatccgcaataagttgaattaaaagacgaaataaaaaaggggattttggcgattaaaatgtgaacattagtaagaattaaaaaagtgcggtgattaaaaaccgcacagaatgattaagcaacgggggactgaatgccccagttgcaatttacaccgataaatcaagcgtgaagcatgtctttcttgatagcgtcaaccgcacgcagagaaagtgccaccatactcaaggttgagttgaccgtgcccgcagacgccatcgcgccgcccgaagcgataaacaaatttcggtggtcatgggtccgcatccaaccgtctacgaccgaatctttcggatcatggcccatgatggtgccgcccataatgtggttgtttgggttgaaataaggcgtggactcaatttctgtcgcgccaaacagctcggcaatctgttgcaggtgttggcgagagcttggttcagcgcggcgcacatagtcacccacgtcataggtaacatgcggatacgggatccccagcccatcttttttggtggtgctaaggcgcaggcggttatccgggttggccaaaatatcgtggttcacatagatatccataccgcaggccgcacggcggcgaatttcttcgtctagctttttacccaccagccccatttgtagagccttgacccccgccttatggttctgtgaggtgttgttcatgccgatctgaatagcggaacgatcgcgacggaaatcaccgtcgcggaagttggtaatcgagctcatctgcacggaaccgccgccggtccagataggttctgccgcctggaagctcatcaaaatgcccggatggtccatcatattgcgaccgacatgacccgagctgttggcaatgccgttcgggttacgatcgttggcagccagcagcagcagcttgggcgactcgataccattgcccgccagcacgaaggttttgccggtcacacgggtcgacttcttgtccggatcgtagaaattaaccgccacaatctcgttggaggcgttggtttccatgctgtaaacaaccgcattagagataattttagcgccatattcttctgcttttacaatggcatggataccgttaaacattgcgccaatggggcatatcggcatgcagttgttgttgccgcagcactgagggcgtccgttgtaagggcggctgttacgcgcctgagggaccggcgtattttcgtaacccgccttggcgaccacctcggtgaaccggcggtcagcgggtccataaggcatcggttccatcgggaatggctgcttacgcggcgcaacgtatttcagcgtggtgtcattcggcccgttgacccccatcgccacctccgcgcggtagtaataatcctctagctcgtcataggtcaccgcccagtcgcggcctacgccataggtgctgtacaactggaggtcatgcggcagaaaacgccaggtcgaggcggcccagtgccaggtggtaccgccaacgccgcgcaccacccctgacggtaggcagaggcgtctggaccatcaacctgcgggtactcgttgtaagggtgtagctgtggatgaaccgcccaaggcgatgccggataaggcgtcgcataatcagactcggatttattcaccggcggcatattacgccaattttcaacgacctgagcacgctcccaacgcggccctgcctccagcaccagtaccgataatccggcctgtgccaattcttgcgccacgaaaccaccgcaaatcccggcgccaatcacgacgacgtctgcactcaattcattagacatttttaacctctaaaatttttgtaggcgccctgctgcgcgcgataatcattcgatacacgtcgcgcttagcggcgtttgcggcgcagacgccacacggcgagcagcacaaccaaaatcacgacaatcacaccacccgcaagggttgctggaccggccacgcgtgcaatgagcggcgtcgctccaccttgacgaatagttttcacgtcctcttcggtcacggacagctgcggattgccatactgcttgaacagataattacttagcgtcgcgacctgcttgtcactgagcgcctgcacgtccgaatacgggccgaatgctggcatcagtacggatttcccgttgaccgtgcgctgtacgccaaacaggatggtcgataccagattgtccggtgagtcgccgcccagcgtggtgttgtgcaccagcgaaggatagaaaccgtcatgcgtgcctttaccgtccggctgatgacagctggaacagctggcgtcgtacagggtttgtcccgaagcctcggcagaaaggaacttggagatcggatgaatgcctcgcgtcgcggtgtcagagttggaaccggtaccaaattccgacgctgcttgggtctgtgacgggtcacgaaccggaggcagggtgcgcaggtaagcaatgatcgctttgatatcatcgtcatgcagatattgcaggctgttggtcaccgcttcggccataggcccggcagcctgagccttgccgttgacgtgcccagtttgcagatactgcgccagatctttatcgctccagccaccgaggccactcaccgcatcgctggtcagatttggcgcatgccagctgcccagcatggcaccggtgtacagtgcatttccgccctgaagcgccatcagcgcattgcgcggggtgtggcattcgctacagtgctcgacgttatcgaccaggtattttccgcgattccaggtggcatcctcagactccacgggggtaaacggctttttgtgcaggaacagcagattccatcccgccatggagaaacgcaggttgaatgggaaactcagcttggtctgctgcggcttttcatcaatcggttttacgccatgcataaagtaggcataaagcgcgtggatatcggcatcggtcaagccagcgtaggacggataaggcatcgccgggtaaaggtgactcccgtctgcgcgaatcccctgacgcacggcatcggaaaattgcttttccgtatagtttccaataccgaacccttttgagggcgtaatattggacgaataaatgatccccatcggcgagtgaatcgcgtaaccacccgcaaacactttcttactgctgggatcggtatggcaggccgcgcagtcggctgcaatcgccaaatattgaccacgagcgatgaggtcagcgccggtctggtggtcggaaggcgcggccaacggcagactttctgcggcgtgcgacaccgctgaccccattagggccgctgcggcaatgcccgcaaaatagaaggctcgcctgaacggcatttttcgggttagtgagtaatttgttggcaaggacctgctctccataatcttttcattttataaatacgcgcgctgaattttggccatagaaagccgcgggctttttccgggagaaaaaaccttcagacgtgaaaatgacgtttatcgttatctcgtgctgccggagaattaacgccggtcaaacaaacctgctcaggctagcgcctggggttttagaacgtcagcagtcgatcaaccggaggcggattcgccacccaatagtcagggccgttgtgagcataggtcggaataaccatgccatcgcggggatctgatacattagcgcctgctgataaccatagaccgtagcgtgatatccgggctcgataaccccgctgtaccaggccttgataattgtcatcataggatcatgcaaaggctgttgttttaatttttcgtccagcgtttccacatcgggaatattattttgcttcacgaattcactgagctgttttacctcaccggcgaattgggtatttttctggcaaagtgcggaataaagacgctcgcccagctgaatatccagactattatgtcctgtgagtaaacgcgacaaacgaataaagccatcgaaatcggcagaatcgttatttgagttggccgctaatgccggggtggaggttaatccgccggagactaaagcaaagctggcgattaatgtgccggaacgggaaattaaatttcgtcgtgaacgaccgttgctgctcagttcagagttatcctctgaattattgttttttttcacattgttccctaaagcaaaaccctgtttgcatgacattgaataggaaaaaattaaacgcacgatgggtgtgtgggttgatgcagaacgcatgcccggattcatcataggggatttgtgatgggagtcacagttatcggctcattattacggcgttaaatgtaacaaaatcatgattatatgtaacaaacttcattgaattgtttaaacaaattcataacaataattttacatacattatttatcggataatttattttttgaaattacgttctaataaaaataatcttaggtattatttttagtacccctaacggcattcaaatatcgaaccaataggttcattacattgttgatgattattttattcacatccattttcatatcatgaaatattatttaataactcgacgccctgctgctgaatatctcgctcgggagctcgaccaattaacataaagttgtaccccttgcgacgccaatacaccacgttcatccccagacgtttttccgcgatctgcgcctgagcgcccgcgcgggagcttggcgttatgcataacgcgagtggaccatatttctcgtccaaccaggaaatttgcgcaatgttgtagtcgtcataacgcaggatgcgggcatttttaagctgtgctccggttatctttaactggggcgtcttcaaagcaatgcccacctctttcgctacgcggttcaactcctgctgttgcagggcgggagagtccgagacgtcggccagcgtatcggcggtgtagagcgacatatattgagcaacccgatcgcgccagctctggtcagcagagtcagggtcggggaaagaacgaaacgccccacccctgcgccaatcatcaggaaactcagcgcggccgccagcaggctgcggcggcttaagccaaccttggtcgcttccgccgtcggaatatacgccagtttgtcgagccggctctgcatctcggcgacgggagcctggtccagcattggcgagaatgctgcgccaaaatcgaactgggtctgctcaagctgggacaagcgggtagacaaagcctcatcatgctgcaaacgtttttcgagggcgcgtcgctggtcgccctttagctcgttgtctaaataggccaccagcagcgtgtcgtcattagaaaaaagagaaagattatcggtcatgatgttctcccccggtgagaagccgccgccgattttcctgccagcgtcagtcgggcactggcgaggcggctcatgatggtcccgacaggcacgtcgagcgtttgcgcagcttcctgataagtaaagccttcaacataaaccaaaaacaccgcattacgctgcgcttcgggcagctgattgacgcgctgcattacctgattggcctggcgctgattgtcgaactcgacggggtggcattgagttcgtcaatatcaacgaagccttgaccgcgtctgacttgctgcgcacggacttcgttgatccagattgaatgcaaaatggagaaaaaccagcgatcgatcggcgaaccttctttaatctgctgggcacgttcaagcgcacgcacgcaggtagcctgcacaaggtcatctgcaacgtcacgtttttttgacaacaccatggcgtaacgccataaacgcgccagacaaagactcaactcattacgcagattaggggaggtaattttatccgccttagttttttgccattaaatcatcaggattcaggtcgtgctttaatcatataggcttcctcgaaatattcctgaatattggtacagcgaccgtcgagagcgacctcttattgataatagcagggcaatgcgttgcttcaggggcctctttgtctgtcgaagagagcattcgccgtaacgtcccgtcacgcagcacgtaatgatgaaataacgcggcaagagcgtgtaaaccggccagcacgatcagcgcccaggcaacattattgtgcagcatgccgaaggtacgtcgcagcgacgagtcgataccaaaaacgtcagggataggaaataccgagaagaagtaaaaaggctcgccctgcgcccagcgaaagagaaaaccgaggctaatttgcgccagcaggagggcgtagagcgcccaatgcgtgagcttagataacagcaacatcgcagtcggcatcggaatagcgtcgagtcgggcaggatgcattatccgccacagcagacgccagactatcaccatcgccagcagaataccggttgagatatgcagcgactgcaacgcttttcgcagcggtgtgcctcgctcaaggacctcccagatatgggcgctggcaaaaagaaaaatcaccatccaggcggtcagccagtgcagcaatagggtcagatggtcatagcgtttacgcgaaggagaaagagggttatttttcatagtcgtgccccagatgttcgatatcggagtaaacacccaggcacggaaatttattcgctcatttttaaattatttttttgatgcagcgcgttccactcatcgcgggtgatttcccacagctcggagtccatctcaccgccgacgtaggcctttttctcaacccgtaacagccgcatgccgctagactcggaaattcgttttgaggcccgattcaggctggccttaggcgcacgcagcacctcgcgattcaaagtattaaaccagaaatcggtgaccgccatactggcctcagccatgattccctgcctttgccattccgggcgcagccagaacccgcgattattgtcttcggcatcggtcaggcaaataacgccaagcaactccgaaggcgaatccttgtggcgcagcgtccagaaccagccggtaccggcggcaaccgcggccagcgccacgttattgacgtaattgtgcgcgccgttatcggggaatggccagggaacggcggccgccagatactgcacaatttcccagtgcggaaagacgcgctgaataaccggtgcgtcttcgggagacaatggctggaggattaaacgttcggtgttaaggacaggcactgccgctggctgcataaaaactccttttcatgatgaaaatcggcgcgccagcgggggattttacaggaacatgccgcctgacgcctcgatgcgttggccgttggcccagccgctttgctcgctcaacaacatggcgaccatgccgccaatgtcatcgggctgaccgacgcggccaagcgcggtgtttttagcaacatactgattaatttgctggttgtcacggactgccccgccgccaaaatccgtctcgatagcacccggcgcaagaatattgactgagataccgcgtgcgcccaattctttcgcctgatagcgcgttaatacttccataccgcctttcatcgtggcgtatgcggcaaagcccggcagacagaaacgcgtcagccccgttgaaacgttgagcacgcggccgccgtcggcaatcagcggcaatagcttctgcgtcaggaagaacggagccttgagatggatcttcatcagcagatcaaattcctcctcggtggtctcggcaaaagaagcattgccgccaatcccggcgttattcaccagaaaatcaaaattctcgcgctgccacaccttttctagctgtgactttacctgcgccacgaaaggatcaaaaccgttgctctcagccacgttgagctgaagtgtcaccgctttcgcgcctttagcctcaatttcacgaaccacggattcagcctcttcacgctggctgttataagtgaaaatgacgtcaataccttgttctgccagctttaataccgcatttttacccaatccacggcttgcgccggtcactaatgcaatttttttgctcattttgagactccagagttgcgtcgttgtgtgataaacagcctattagactctgcagaaatgataaatggtctaaaatgagtttcactgtctcaatgacaacaacaatagacggtttatacggggaaagtgtggataaaattcaatcaatgcaggtttttgtccgcgttgccgagctgagcaatttcacgcgcgcggcagaaagtctgggattacccaaggccagcgtgtcacggctcgtgcaacagcttgaaagcaaaatgtcgacgcggctgctgcatcgctcaacccgccgcgtacagctgacgcaggacggacaggttttttatgagcgctgcaaagaactgctggccaatatggacgaactggagtcgatgtttcaatccaatccaacgacggtcagcggcaagctgcgggtcgatatgccgttgacgatggcaaccaggctcgtgctaccgcgtctggcagaatttttgaaccgctatccggcgctcgagattgagctgagcagcaccgaccatcgcgtggacgtggtgcgagaaggtttcgactgcgtgataagcgtcggccttcttaaagactccgggctcatcgctcgtacactgggtcatctcagcgtcgtcaactgcgccagcccggactacctgcagcgctacggcatacccgaacatcccgaccagctcgcccatcatgcgatggtgaactacgaccaggcgctgcgaagccgcagcaccgaatttgaatatctcgatggcaaagagctgcggacggtgaaatgcggcagcaccatcaccgttaacagcaccgagagctacacggtcgcctgcctgtctgggctggggattattcaggttcctgcgacgggaattaaacattatctcgccagtggtcaactggtcagcatcttgccgcagttccgcgcaccgccgatgccggtcagcctcgtctatccgcatcgccgacacctgtcgcgcagggtcaagctgttcatggattggctgagtgaaatcatgcaacactatattgtataaggattttatgatgataatttcgcccgtaacgggccttaacggattgggcggctatactagacactggaacttgaataacgataaggactcagtggattaatgccattacccccacaagaagaaaatatccaagatgatagcgataagccgttgattaatatcaagacgggaaataagaaagtcgatgcgaccctgtcgggtttttctcgcctggtaagccatgttcagggctggcactgggtagcgcatttgctgcgtgcagccgacagatttaacgaccgtctcggcagccagtttggcgcggcgattacctacttctcatttttgtcgcttatcccaatactgatggtctcctttgccgccgtcggctttgtgctggcctcaaatccagacctgctggccggactgatcaacaaaatcgtcaatagcattagtgaccctaatctggcgaacaccctcaagagcacggtgaacaccgctatccagcaaagaacggcggtgggactgtccgggttggtcatcgcactctattcaggcattagctggatgggcaatctgcgtgaggcgatccgcgcccagtctcgcgacgtgtgggaaagaaatccgcaggaccaggagaagatccacatccgctacctgcgcgactttgtctcgttgaccggactggtgttggcgctaatcattacgctctctctgacctccattgccggttcggcgcagaaaactattgtcgatgcgctgggtctgggcggcatcgactggctgcggccggtgatgacggtaattacgctggtcatttctgtcgccgccaattacctgttattcctatggatattctggatactgccgcgccataagccgagaaaaaaggccctgctgcgcggtacgctgatagcggctataggctttgaggtgattaagtttgtgatgaccatgatgctgccgcgactggcaagctcaccttctggtgctgccttcggctcggtgattggtctgatggcctttttctacttcttcgcgcgcttgaccctcttttgcgccgcctggatagccacggcccgctatagcgacgatccgccgatgcctgagcctaaccacgcacataagccttaactcaccccttcatgccagacagcgcaaagtgtctggcatgaaaaaccaatattcaacccaaaaagcagtgtattattctaaaacatcacctttcacatcgataaacttagaacaacacactgtctcactcacttttctttcactcttttacagaatgttacgctgaaaataaatcattcaacaaacttatgactagccagacccgaggtttatggggaatctcccaattccaccctatacgcggtttctgcgctatttggccctgttgaaactcccctaaccagtgcataagatgattttttaattcgaatcaatttacttacaaaaccaataagaaacacttatgcaagccaccatcactccagaacttgaggccgacgctgaactcgtcagccagaactctcgcggcaaagttatcatcgcttccctgattggtaccgccatcgagttttttgacttttatatttatgcgacggcggcagtcattgtcttcccgcacattttctttcctcagggtgaccctactgcggcaacgctacagtctctggcgaccttcgccattgccttcgtcgcgcgtcccatcgggtcggcgctattcggccacttcggtgaccgagtagggcgcaaagtcacgctggttgcctcactgctgaccatgggagtctccacggtcatcattggtctgctgccaacctacgccaccatcggcgttttcgcaccgatactgctggcgctggcacgctttggtcagggcctcggtcttggcggcgaatggggcggcgcggcgctgttagccaccgagaatgcgccaccgaaaaaacgcgcactctacggctcattcccgcagcttggcgctccaatcggcttcttcttcgccaacggcatgttcctgctgctgtcatggctgctgagcgagcaacagtttatcgactggggctggcgtgtgccgttcctgctttcagccgtgctggtgctcattggcctctacgtgcgcgtgtcgctgcatgaaacgccggtgtttgccaagattgccaaagcgggcaagcaggtcaaagtgccgatcggccgcctgttcagcaagcacctgaaggcgacgattctgggcaccttcatcatggtggcaacctacaccctgttctacatcatgacggtgtactcactgggctacggcacttcgcctaagccagcgggtctgggcattgcccgcaacgacttcctgctaatgctgatgattggcgttatcggatttggcgtgatggtgccgattgcaggtcaactggctgacaaatttggccgtcgcaaatcgatgatctgcattacgctgctgatcatcctgtttgcgctgaccttcccgtcggttatcagcggcggctctatcggtacggtgatggtattcctgctgtgcggctttagcgtgatggggctgaccttcggtccaatgggcgcacttctaccggaacttttcccaacagaagttcgctataccggcgcatctttctcctataatgtgtcttcgatattaggcgcttccgttgcaccttatattgccacctggctggcaacccattacgggctgttttacgttggcgtctatctggcatccatggcaacgctcacgctcattgccttgctgttaaccaaagagaccggcaaccagtcactgtgattatttcgcctggcgttgggcttccaatgccgggctttatcaaagagccattacaatgcgcttgcgacttcgcctgctgtttccctgcttattgttctaatagtcattatcgccatcgcctattacgtctggccacattccggtaatcccagtgcgctgtggaatatcgtcagccagaagtgtgtgcctaatcaggaaaaaaacggtcagcccgcgccctgctctcaggtcgatgagcaacagggttacgtggtactcaaggatatggtgggtcctctgcaatttctgctgatgccaaccgcccgaattaccggtattgaaagccccgcgcttctggaagacaacacaccgaacttctttgcccaggcgtggcaggctcgccactatatggccgataaatacggcaaaccgattgatgacagcaacgtttcgctggcgatcaattcgcagtatggccgcagccagaaccagatgcacatccatatttcatgcctgctgccgcaggtgaaaacccagctgagccaggaggcagggatattggctatcgctggcagccgttgccggagaaactgattggccatacttatctggcgcgtaaggtttcagcggcagaattgaatcagaaaggcgcattccggcttttagcagagggtgtgccggaggctcgcgagaagatgggacatttcggattggccatggtcagcctacagggcggtgacttcctgctgctcgccaatgaacgcaatctgcttcagctgaacaacgcatccaccgaagagatccaggaccacaactgtgcggtgctgaacccactaccgcagtagtgggttcagcgaaaaagagaggaaggcctatttcgaggtcttaatcttttgcaggatggtactgcactgatttgactcgttatcgcttggagaaatcagtgccagcagcgcggcggcaggcgcgacgatcgcccctagcgccacggccgctgcaccgcgtgcgatcagcggacccggtttgacaccggcgtcaggatttttgaaggtcccgcgcacgtacaacggcgagcgcagggtcaacacccttaagcccttactctcggggtcaatcgagagatccagcctttcggtcgcaaagttggtggtaccgctgacgttaatcaccgcattttcggtatcgaagaccagcagattcggccttgccagcccgcttttaatattcacgtctgccgcggcgcagttgatagccacctcgtcatccccaaacagcttggcgaccacatagttaccgacgttaagccccgcaatctccatcagtccacggctgataaccccatcgttaatcaatagtttcatctcgccgttactggtcccgagcagtgcagcaacggaattaccggtgccggtgagcttcgcatcaccgttaagctggccgagacttttcttcatcgactgaacgttcggcaccagctctttcaactgaaggccgcgggcgtggatatcgacccgtccttgcatcggcgtcttgtcaccctcgagcctgaccgtcgagttaagatttccgcccgccaggccaaagcgcagaggatcgagcagcagatcgccgtcattaagctttagatgggtactgagattgctgagcggcaaagagctgccgcgttcgatgcgcttggcactaaacttcacgtctgcgtccatcacacgccagcttttggtatcgaatttctcaacgggcagaactttgtcggaaggctggcgcgtcgtctcaccgcgtttagccttgtcactgttggaatctgcgccaatcagtggtgcaagatcggcgaaacgcagctgattagaggttaattcaccgttgagattagggcgcggcttgctggcaacgtaagtcagcgaaccatgaatatcgctgtctccaattttgccgttaaagccttgatattcgaattttgcgccgtttttatcgtgcaagtgcgcaatcaggtgaccatcggtttcatacggcggtgtctgtggcagcagcacaccggtcaacccgtagaggtctgagagcgtctgtccggagaacttcaggcgcaggtccaacgcaccaagattcattgggtcggtcagggttccggcaactacgacacgggtattccccgagcgcacgtccgcctgaagcgggaaacgagcatccgaatcctgcaaggccagcattccgccaatcttaccgctccccgccagagattcacctttgtatttaccgtcaaccttccagccaaaaacataatcaggggtgtagagcttaccctcatctttgctgtctttagcactttttttgccggtcacctcgtcatagggcagcggtttacccagcggatccacaacggcgcggaaatccgctttcaacgtcgcatctttgaagtcgatttggccacggtcgaatacgatgtcattcatattgaacgaccatgccgaaggcggctggttaggatctttgttgtcgctgttggcgagattaaaggtccagttatttttaccgtcagccaggcgaataagcgacgcgtcaggctgctttagccagatacgcggaataagtacctctttgtcgagcagcgcaagaggagcaaggctggcatcgacgcgctgcagatgcaccatcggcttgtcgctcggcacatccgctgggttgccgagcacaatatcttcggcatgaatgtgcggccagggtacccaggcacgccatccccctcttccttatgccgcgaccagtccacgccaaggtctccctgaatggcaaaggggcgattcaactcggcagaaaccttctgattaatcgtaggtttaaggcgattccagtcaaacagcgccacaaagataatgatggcaaagaccagaatgaccacgagtcctgccgtccaactcagcgcttttccagtgcgtgtcataggtcggttcctgtgggtcaattatttgataagtttcattaaagatagttgagattatgctgaggtgcacatttcgtgctgccagaggagcactgccgagtgtaaatgcctaccactatattcgtaaacttcgaggcatctcggaaaataataaaacagcgttttaatactattgactgaagtgccacatgcgaagagactggaacgcatacttcttaacctttgatatcactgatggacgcctttatgaccaacaaaaacatcgctgttattggcgagtgcatgatcgaactttcacagaaaggagacgccttaaatcgcggttttggcggtgatacattgaataccgccgtttatattgcccgccaggtcgacgacgccgcgctgaaggtgcattacgtgaccgcgctaggcaccgacagctttagcagcgatatgctgacggcatggcagcgcgagggcgtcgaaactgatttggtgcaacggctcgacaacaagctacccggcctttacgtcatagaaacggacccgagcggtgagcgcaccttctactactggcgtaacgacgccgcggcacgctactggctcaatggacctgattccgaacggctctgtcagcgtctggcagattttgactatctctatctcagtggtatcagtctggctattctcagcgaagagaaccgcgcgcgcctgatggcgctgctcaaggaatgccgggcgcgcggtggaaaagtcatctttgacaataactaccgcccaaggctgtgggaaaataaggagcagacgcagcgcgcctacctggcaatgctttcctgcaccgacattgcgtttctgacgctggacgacgaagacatgctgtggggcgaaaagccgtatgaggaagtgattgcgcggacccatgcgctgggcgtgagcgaggtggtggtgaagcgcggggcggacagctgcatcgtgtcgaatgccaacggtgagcggcatgatatcccggcaattcggctcgaaaaagagaaggttatcgatactacggcggccggtgattcattcagcgccggttacctggctaaacgcctgacgggcgccagcgaaattgaatctgcacagcgtgggcacttaaccgccagcacggtcattcagtatcgcggcgcaatcattccactcgaggcaatgcctgcctgatgccgaatttatataacctggaataacagattgatagtcctgtgcgccgcccaaactgcacggcgcacaggtccagcatactgttgccgtgagcttactgcgccgttcccgtagcactggcaccgggggatgtggccgcggtcgtgctgtcggaagtttgggcatcagccggcgtagcaacaggcaccacgatgctgtcgtaggtttcctgtagcgttttcacactcaactcattctcaccttttggctgaatcaacagtaaggaaggatcgtgagaaagctgctgcttcagctcctgattgaaatcaggcaacgtcagagtcgataaaaacgcctgacgcagtttttgatactgctctggcgcgatatcgacgaccgcattttgctgtgaacgcaggcgctgactcattagcacaccggtatcggtgcgggcataagtcgcaaacagctgacccagctggtctttcttttgggcgatcagcgcgtcaaactctgcctgagacaggccagtgtcgcgcactttcaccagctcatttgcaaggcgcttaagcgcaggctgtatcgcgctttgcggcgcttccagacggatagcgcactgagcatgctgatactgtacgcggcagtcaaaaccaagcgccggttgcaccgccccccctctttctcatcacccggctttttcagcgcctgctgcaaatgcagaaacagcgcctcacgcgctaaatcgctgcgccagtaggcgttgagcgccggagaatcttgaataggctgccacggcatgctccacatcagcgagagtctgtcctgcgtcagcgaagggtcaaacgcggccattgcctgcgggggcacatcagatagggttggcaaagtctgaggtgtctggcggctgcccttcagcgaagagaaggcgcttttgatttgctcggccatcgcgcggccgtcaacgttgcccaccacatacagtgtcatcgcgtctggcgtgtaccactgatgatagaacttgctcaggtcggccggtttggccaccttggccggcagtagctcagggctgtggcctaccagcgtggaaccgctgatgcggtaacgccaccaggcgtcctgcgagtcaggcgggagagaatcgatagggtcctgcggtgcctgataggcggcatgaacagaatcctgggtaatcaccatcttgccactggtgtcgaccaaccagtttagtgccgttttcatcagatcaggacgaccattcggcaggctaaggttataagaggtgaaatcgtaagaggtaatagccggagacattgggcgttgattatcaatcgcctgctgccagaaggactgaagttgggcagtggtaaaaccttcactgcggattaatgccaggcgcggtaggaagtgcgcgaagccttgctgctgcggattttctgccagcgatccggtacgaaccagtaatctgagttcgatgcgatcgttgggacgctgcggcgtagttaacaattgccaggtgaagccgttatccagtttgccctgttgccaggccggatcgggttgtagtgcttcagcctgcacgttgctgcaggccgatgccatcaacaacccaccaaggagtaagcgaattctggtgccctgcatgtgaacccctacgtaataactctacccgtcgtattgaatctgcgttttcggcaactccaattactggggtaaatccaattttctgtaattaaatcttgctcttaccctaattaagaggtggcaagctcgaatgcaataaacgaaaacggcgagtgtagcactgtcttagacagcacaactccgcatatgtcacggacaacaatgaaaataatctggcgctgaagccggacggacactgaaacccattcgttttcgtgattcgggatggaaaataaataagagtatattatgaatataatccaccggttacatcaagtaacagcgggattaaaagggaaattagcgtttaaaagggccgttttagcggaaaacggcccctgttattagcaacgatggggcaggaaagccttacacggtcttatcggcaatcgcaggtactttgccggataacgttgaattcatctgcttttcatctaactgatcgcaccacttagccaccacgatggtcgctacgccgttaccaatcaggttggtcagagcacgggcttccgacatgaagcggtcgatacccagaatcagtgccagacccgcaaccggcagatggccaaccgcagaaagcgtcgctgccagcacgatgaatccactgccggtgacgcccgccgcgcctttggaagacagcaacagtacgaccagcagggtaatctggtgccagatatccatgtggctgttggtcgcctgagcgataaacaccgccgccatcgtcagatagatagaggtgccgtcgaggttaaatgagtaaccggttggaataaccaaaccgaccactgactttttacagcccagcttttccatcttgtcgagcatgcgcggcagcgcagactctgaagatgaagtccccagaacaatcagcagctcttccttaatatagctgacaaacctgaagatattgaagccggtaaagcgcgcaatcagacccagcaccaccaccacgaacagcacacaggtgaggtagaagcacagaataagctggcccaactgcaccagagaacccacgccgtatttaccgatggtgaaggccatggcaccaaacgcacccagtggagcaaggcgcatgatcatgttgatgatgccaaaaatcaccttcgagaagctgtcgatgaagttgaacatcagctgacctttgtcacccaggtggtgcagcgcaaagccaaacagaatagcgaacatcagcacctgcaggatattgccgctggcaaacgcgccaatcacgctgcctggaataatatccatcaggaagggaatgatcccctgcgtttgcgcctgctcggcgtaaacagcgaccgctttagcatccagcgcagcgggatcgacgttcatgcccgcaccaggctgcacgatattgacgataatcagcccaagaatcagcgagatggtgctcacaatctcaaaatacagcagcgcaatcgcaccggtgcgacccactgccttcatgctttccatccctgcaataccggtaacgacagtacagaaaatcaccggagcaataatcattttgatcagtttgacaaagccatcgcccagcggcttcatctgcgcccccagatctggataaaagtgtcccagcaataccccgagggttatcgcagtcaacacttggaaataaagactcttaaatattgtttttttcattttacggccatcctgtagtgaaagtatccccaaagatttcaagacgctggaacgaaacggcccgaaaagcggagggtacatcgccatagatatacagcagtcgagagaatagcgacagccggaaaatagcaccgacattacaggatggaaataaattgtttcgtttggcaatcattgttgttataaaagttgaactgaaaggattcagctaaaaaattaaataaatattaatattaagtcaagccagtaatgaagcggctttgcggggagttgaggggcagttaaaccatcgtctcgttgaggagaaattttgtttcaaattcgaccagcggaacgggtgctgaaaatagatagccttgtccaaaaagaatgcgattgttcaataaccaaccgcgctgcgcctcggtttccacgccttcagctttcagctttatgttcatcgcacgcgcaatcgaggcaacaatgttggccatcgcatcatcttcgggcagcgaggcgacaaaaatgcggtcaatcttgatagcgttgatcgggacattgcgcaggcggttgaggtactcaaggccagaataacctagcccaaaatcatcgagctcgaccgaaattcccaatctgcgcagctcggcgagaacaatcaacgcctgctcccagtcggcgatacgcgccgtttcggtgatttctagcaccagctggccgttgtcgatttggtaacggctgatcagactacgcaattcaggcaggaagttggcctgctgaatctgtaccccgagaggctcagcgacagcggcagcgtaatgtcacggcgacgccagtcggccaggatatggcatccaagctccagcatcttgtagccaagctgcgccatcacgccaatctcttcagccaccacgataaaatcgctttccagcccgtagctgccgtcgttcatcttacggcgcaggaatgcttctgcgcccatcacctcaccggtagacatattgacctgcggctggatgaacagcgtaaagtcgttcttttccattgcgtgaaggatttcgttttcctgcaacaggcggcgatgaattttcgcggtcagaccgggttcgaagaaaagaatttggtttttgccctgcctgtcggccgacagtctcgcggcgcgggcgtgggtaagcagctggtgaccgctaatcgcctgcctgccaatatattgggcaatgccaatactgccggtgggatgtagcgtgatgcccatttcagcggttgtctgcggggtattgatgctcgccataagttctctcgccagccgcatcgccataaagggacgttcaatctcgctgaccatgaccgcaaattcgttgtagcccagccgcgcgagcaggctttgctcgggcagcaccttcagcagcgaggagataaccgggcaaaatgcgccctccccttcacccacgttttctatgcaaatcagcatgatgtggaaatctttaccggcaagactcccgttgatccgctgctcgacgcgagaaacgaactgctcttcattaggaaagctctcccgcgtttcctgcatcgctttcagcgccttatcgagtaactgctggttgcggttatagctgcggatcaaaatacccagttcgtcgtcacgatggcgcggccgcgcggccaactggtgatagtgcacctcactctcaggcaaggactccagttcgcgggcgattgaacgtaaagggtggataatcagccggttaatacaccagctgatggcaatagagagcaccagcgccagcagcagatacgtggtcaacagcgttgataacgcgctgacaaaaaactgatacatgcgataggggtcggcctgtagcaccagataggcgataggctgcgacgttgtgggattcaccgcgggtgaatagagcggtacggagaccttaataggcagatcaaagcttgccattacccagtcaggaaccgggcgtccctcgggaaaatgcgtgctaagcgtgggtatacgattaggcaacacaacctctgcgcggttaagaatgcccaccggtcttagcgtattaaggatgtgctgcgtttctttaaggtcgacgtttagaacggattgcgacaacggacgaaccaccgaatggccgatattttctaactgctgggcgtagtcgtctctcctctgctccacaaagtgaaacagctggatggcgataaagaagcagattgtaaccagcgccacacctgacactgccgccatctgtttaatcgttagcgaacgtctaacccgcaacctttccctcctcgccgaatcctgaaaatgcatcctcagcgcatgataacagctcgcgcgcgtgggtgcagtaatcgcgttggcaggcggttttgacggatgaaaggggtgttaaggcaaaaaatgccggtcagcgaaccgaccggcgtcatgcagagcgttagattacccgtgaacggcggttttttcctcttcgtcctgatcgacggcaaaacaggctaccagcccatcgccgtactgcttcaactggggctgcagctgagtacattttccgaaagcacgacgacagcgggcgttaaaagcgcagcccggcggtggattcagcgggctaggcagctcgccggtcagctttatgcgctcacgacgatcgcccggattcaggcgtggcgtcgcagacagcagcgcctgggtgtaagggtggcgcggattgttgaacaccgcctccttcgagcctttctccacgcagcgcccgagatacatcaccatcacttcatcagcaatgtgctcaaccaccgacaggtcgtgcgaaataaagacgtacgacaggccgagatcctgctgcaaatccatcatcaggtttaatacctgtgcgcgcaccgacacgtccagcgcggagaccggttcgtcggcaatcaccacgtccggatccagcatcagaccgcgagcaatggcaatacgctgacgttgaccgccggaaaacatgtgaggataacggtcgtaatgctcggttttcaggccgaccttcgccatcatcgccaaggctttttcacggcgttcggcgctgctgagcctggtgttaatcagcagcggttcttcaagaatctggccgacctttttacgcggattcagagagccatacgggttctggaacactatctgaatcttctggcgacgcagcttctcggcggtgacgtcaggcttgagcaggtcttgtccctgataatacagttcaccgtgggtcggcacttcaatcatggtcagcagacgcccgagggtagatttcccgcagcctgactcaccgacgaccgccaacgttttgccacgctccagctcaaaagagatgccgtcgagcgccttcaccgtgcgttcaggtttgaacatgccgcccttgaccgcatagtattttttcagatcgacagccttcagcagcggctgctttccggtggtgtgattaagactcataggttggtctcccggcatcatccagcggataatgacatttggactgacggcccggttcaccttgcagtgcaggctcttctttacggcagcggtcgttggcatacgggcaacgtgggttcagtagacaaccgtttggacggtcatacttgcccggtactacgcccggcagcgactgtagccgcgccttgtcggtagaaaactccggcagcgagcgcagcagcgcctgagtgtacggatggcgcggcgcacgaaaaatctcggacgacggcccggtctccaccacctgcccggcgtacatcacgatgatgtgatgcgccgcttcggccaccaacgccaggtcatgggtgataagcatcagcgccatgttctctttctgctgcagttcgagcagcagttcgatgatctgcgcctgaatcgtcacgtcgagagcggtggtcggttcgtcggcaatcaacagcttaggccgacaggcgatcgccatcgcaatcatcacacgctgactcataccgccggaaagctggtgcgggtagacgtccagacgcgacgcagggtcaggaatacccaccagattcagcaggtcgatcgtacgctgacggcgggtctttttatttccgccctgatgcaccttgatggcttccataatttggaaaccgacggtgtagcaagggttgaggctggtcatcgggtcctggaaaatcatcgcgacctcggagcccactatctgacgtcgctgtttttcactgatgccctgcaggttctgaccaccaaattccagctggtcggccatcaccttgcccggaaaatcaatcaaccccatcagcgccagcgaactgaccgatttacccgagcctgactcgccgacgatgccgacgacttcgccctgcttcacggtatagctgatgcggtctacggcgcggaatggtgcgccctcattaccaaaatgtaccgacagcttattcacagtcagcagcgtcttgccgaccggtacttgttcaatcaatgttgtttccatctcgcgccccttactgcttgagtttcgggtcgagggcgtcacgcaggccatccccatcaggttaaatgccagtaccgtcagcagaatgaccacgcctgggaaggtcaccacccaccaggcgctttgcgcgaactgcagaacatcggaaagcattgtgccccactcaggcgtcggcggctgtgcgcccatgcccaggaagccgagcgccgccatgtcgaggatggcgttggagaaaccgagtgaggcctgcacgataagcggggccagacagttaggaagaatgttcacaaacatctggcgcgccgaaccggcacccgccacgcgggaggcggtcacgtaatcgcggttcacctcaaccagcaccgccgcgcgcgtcagacgcacatagtgcggcagcgcaacgaaggtcagcgccagcgaggcgttgacgatcgacgggccaaagatagcgaccagcaccagcgccagcagcaggctcggcagggccagcatgatatcgaccacgcgcatgataatggcgtcaaccacgccgccgtagtagccggcaaacagaccgaaaatcacgccaaggatcagcgaaagcaccaccaccaggcagccaaccagcagcgagaggcgtgcgccgtacatcagacgcgtgaggatatcgcgccccacgtcgtcggtgccgagcaagaacttccagctgccaccgtccatccataccggaggcttcagcagagcatcgcggaactgctctgccggaccgtgcggtgccagcaggtttgcaccgagcgccagcagcagcatgatgacgatgtaaaccagaccggtaacggcccctttatttcgtttgaagtaatgccaaaactcgcgcattggcggcataggcgtcggggcgcccgtaaccagttcaccggcgacaggttcagtaacttgagtcattgtgcgcctcttatttcttgtgacgaatacgcgggttaacgatgccgtacagcacgtcgaccaacaggttaaccaggatgatcagcgtggcgaccagtaatacgccgccctgaaccaccggataatcgcggcgctgcaaggcttcaattagccagcggcccacgcccggccaggagaagatagtttcggtcaggatcgcaccgccaagcagcgtacccacctgcaaaccaatgaccgtcaccaccggcagcatcgcgttgcgcagcgcatgaaccacaatgacacgcatacggctcacgcctttggcgcgcgcggtgcggatgtaatcctcacccagcacttccagcattgaggatcgcgtcatacgcacaatgaccgccagcggaatagtgccgagcacaatcgcgggcagaatcatgtgcatgatcgcgtctttgaaatcacccggctcgccccagatgagggtatcgattagcgcaaaaccggtgagtggcttgctgtcatcaaggaacacggtatcgcttattcgccctgaaacaggcgtgagattccagtgcaccgagaccagcataaccagcatgatcccccaccagaatatcggcatcgaatagccggtaagcgagatgcccaccgccgtgtggtcgaagatggaacctcgcttcaccgccgccagcacacccaccggaataccgacaatgaccgcaaagatcattgcacaaatgcccagttcaagggtcgcttcaaagcgcgggaggaattcctgccagaccggtgtatggctgctcaacgacatgcctaaatcgccgtgtaacacgccaaccacatagtggaaatactgttggtaaagaggcttgtcgagacccatttctgccattagctgagcatggcgctcaggtgacacaccgcgttcaccggccatgatagtaacggggtcgccggggatgaggtgcacgaaggcaaaggtcagcaaagtaatgccgataaacgttgggactactaaccccaaacgtcggagtatgaactgcagcatatcccgtactctctgtataaaatgcccggggaaccgtagctcgccgggcttattgttaactcacattgctttaacgatttacatctttaaagtttagtccgctttgagcgcgccgcttcctgcgcgctcaatgggcagttatttaatgtcgacgttttcgaagtgatgtttacccagtggatcaaccacgtaaccgatcacttccttacgcactggctcgtaaacggttgagttagcgatgataagcgccggagcctggtcatgcatgatcacctgagcctgtttgtagagcgcgatacgcttgtcatggtccggttcagcacgggctggctgaatcacgtcttcaaacggcttgtagcaccatcttgaatagttggaaccgtctttagccgcctggcagctgaagagagtggcgaagaagttgtccggatccccattgtcgccggtccatcccatcatcacggtctggtgttcgccatttttcgcacgcttgaggtattcgccccactcgtaggtcacgatgttggctttaacgccgattttcgcccaatcagcctggatcatctcggccatacgacgcgcgttcgggttataaggacgctgaaccggcatcgcccacagatcgatagagaagccgtttggcataccggcttctttcagcagctctttggccttggcaggatcgtaagggtagtcctgaacgtcgttgttatagccccacatggtcggtgggatcaggttcttggccgcctggcctgcgccctgataaaccgcatcaataatcgcctgcttgttcacggcaatagtcaacgcctgacgcactttcacgttatctaacggttttttctcggtattaaacgcaagatagccgacgttcagtcccggttcagacatcaggttgattgacttgtctttcttcattgccgcgatgtcagccgggttagggaatggcatcacctggcactcgtttttctgcagcttggcgtagcgaacggacgcatctggcgtgatggagaagatcaaacgatccagcttcggcttggtgccccagtaacctttgaaggcggtgtacagaatgcgcgagtctttctggtactgcatcatctggaacggaccggtaccgattgggttaaggtcgagcttctcaggcgtaccggctttcatcatgtcgtcggcgtattcggaagacagcactgaagcgaagtccatcgccatatccgcgaggaacggagactcaggatggttgagcacgaactgcacggtatggtcatccactttgacgattttgttgatcaaatcgcccatgcccatgccgtcgaagtattcatagttgccgcccgacactttgtggtacgggttcgcagtatctttctggcggttaaaggagaaaagcacgtcgtcggcgttaaagtcgtgggttggcttaaagtctttgctcgactgccactttacgccctgacgcagatggaaggtgtaggttttgccgtccgggctgacgtcccatttttcggccagtcctggctgaatttcagtcgtaccaatcttgaactcaaccagacggttatagataggtacggagctggcgtcataggttgtacccgaagtgaaaagctgtgggttaaagccttctggcgagccttcagaacaataaactaacgtttttgcctgaacgctggcggccacggtcagcgcaatcaggccgaggctaaacttcagcaggcctgattttcccaaggaaattctcatcgcttttgctccatttagtaatggtgatgtggatgtgtgttgtgtgttcagctcaagccaccctttattttttatttacgggtggacagggttgtcggttagctgcagaagtgatgtttcagacgtatgacaaacgtcaccagagatgttttggggaaacagttgcaccaaaaaggggtgcaaataattaccggattaatcctctggtcaatcctgttcacatcaatttcgcaactctctcaggcgtcgtcaatataacgccaaggcttttacaaagagtgtgagtaacagcaaacaaacataaaaaaacagttaattaacatttacaggattaatattgagtcataaatcgatatttcaggacataacaccacgcttgttagcccaaccagcggaaaacgccgtataaaaagctcaaaaatcccgcgtcaaatgatgattatatgaacggttattttataaatttgggtaaacggcagccgaaaatgctggagactagtcataaagaggtaattaaggcacgcttatttcactattgaaataaacctttcgaggggaaaatggggtgttatgcacaattatagtgcaggttaaaaatcgcgcaacagcccctctaaaacctaaaatagaaaacatttcacaccctgccgatttcggtaggcgtgagatgataataatgcgcagcgtgattgatgcctgtttcagtcgacagggtctgttttggaaccgacatttgcccccgcctcaatgaattcgctgctttaatttgcgattttcaatgggggaattattttttcgaccgaacaccggtccgaatcctccgaatccaccctctcctcatggcacacgtgctcatggctgctaggcttaagtcagtcctgctttttgtagggtctttgttgaataaacaaccacacacaaaagaaaggagcatgttgtgacttttaaaaaaatcatcaagcttgcagatcttgcaaaaaatcagccgaaacagttcgaaagcgacgaaaccccatttgtgctggtccgtcaggacgacagcgtgcatgcgtatcaggcaaattgcccgcatgcaggtgcgccgctggcagaaggggccgtgtgcgacggcaagctggtttgcccatggcataaagccgtgtttaatcttgacgacggtagccttgaacagccgcccgcgctggaaggcctgacgcagtaccccactaaagttgaacacggcgaggtaatggtcgatgtgaaagacccccgtcagcatacccgcctgcaagccggtaataacaccgatcaaattgtaattctgggctcgggtgcggccggcagtgctgcgctgagcgcgctggaagaaagcgggtatcacggcaggatagtcattatcgatcgggaaaagtctgccccttacgacagaactgcactgaccaaattcgtgcctgatggcagcatgaaggtggatgaggttccgccgctgctcgaagacagcgcttttgaacagcgcaacgtgcagcggattgtcagtacggtgactcacattgacaagaaaaagaaaaagcttcgcctcgccaatcaacagcatgtttcgtttaaaaagctgctgattgccaccggtggtgcgccgatacgtcccgctctaccgggcggtgagctgagcggtattcacgttttacgtaatctccaacaggaaaaaacgctgctctgcgccgtggatcaactcaaacagttggtgattatcggcaacagttttatcggcatggagatggcggccgcactgcgcaaacgtgatattgccatcaaggtgattgcaccccaaccgttgccgtttgaggcacagtttggcgagaagattgccaaatacttccgcgcactgcacgaacacaatggcgttgaatttattgacggcgaggtcgtgggctttaaaggcgatcgtcgcgtcgaagcggtagagcttaaagacggttcgagcgtaagaaccgacgttgtgctgctggcgaccggcgtacagcccgtcacctcgtttatccacgacctgccgctcgacgacgacggcagtctaaaggtggataaatatctgcaggccgctgaggatatttacgccgcaggtgacattgccagcttcccgatggacggtaaacatacccgcattgaacactggcgcgttgctcaacagcagggccgtacggccgcaatcaacatgctcggcgagcgcgaagccttcgatcgtgtgccgttcttctggacacagcatttcggtacccgcttcgagcatttagggcatcccgaccaatgggacaaggtcgatattattggttcgcttgaggatagggactttgtcgcactgttcgggcttaaagatagtctggttggcgtcgttgccactggccgcgaacgcaccaccggcaggctgctgctcgagatgcagcatgatatgacgctaaatcaggcgcgtaagctggtgaaggaaacgcaggaaggctaatcaccctccctttctgacgtatctccggaagggagagagaggctcccggtcgtctcactgatgcgaaagagacgtttgcgccacgtcgtgcaggcatcgcccgatgagcatgtgcaacggcgattgcctgttagcgtggcgcatgaccaggataagttcacgatgaaacgtgagctcgtcaagcgacacgacgcgcagattcgccttacgctccagccacaatcctgccagcgggaccaacgccacccgagcccattttcgaccatttttacaatggcatcgatttcgtcgatctccagcgcgaccttcggctcaagccgctggctgcgcagaaactggctcaccatacgcccaccgaacgaggtgcgatcgtagcggataaacggctgttcgcgaagcaaggcgatcggatcttcaccttgcaggtgcgtgggggcaatcagcacgaacggctcgcgcgccaacgtttcactgtgcagatctttggccagcgggaaacccggtttaatgacgatagccaggtcgatattgcctgcatcgacctgagtcaaaagattgaatgacacaccggggaccagcttagtttccagcgcaggcgcactctgatggagtttgaccagcacctgcggcagcaggccggtttgaaaggtcgagatagcgccaattttgataaccccgcgaaaatccccgaggctctccggttgagacatgctggcaaagatttcgaggatctgttcagccatcggcaagatacggcttccggcggcgtttaacaccgccgaacgcccggttctgtcgaatagcgtcataccgagatagtcttccagaccccgaatttgtgcgcttacggccgactgagtcaggccaatgcgctgtccggcggcggcgaaagtgccgtcttgcgttactgcaatgaaggttttcagttcacgtaacatcgccgcctcactcatctgtttttttaatgaatcacaacaataatatttgtttttaattaaaaattttatcgttaagaatggatgaacacaatataacctcacaccacattttcccaacctatgcgagctgccactgcaacgcacgccggtcgggaacaggagaattatcaatggctctgagtcctttccaccttgctatcccggtttatgatctcgcgacctgtcgcgccttttacggcgaaacctttggcctctcggaaggccgttcaagcgctcagtgggtagacttcgacttttatggtcatcagctggttatccacgagcatccaaaaacagcgacgcaggattcggcgcacaccaatccggtggacggccacgacgtgccggtaccccattttgggattgtactgagttgggaagagtgggaagccttggcggaacgcctaaagtcttttggtactcagttcgtaattgaaccttatgtacgctttaaaggccaggtcggcgagcaggcgaccatgttcctgctggacccgtgcggcaacgcactggaattcaaagcgttcaaggatatgagtcagctgttcgccaaataagaacgccagaaagcaaaaaacccgcgagccagaagcttgcgggtttttctaaatgtggtcggcgagagaggattcgaacctccgacccactggtcccaaaccagttgcgctaccaagctgcgctactcgccgaattgggccgcatcttactgctgcgggttctaagcgtcaatccctttttttacccaattcgccaactgcttataaaacacacgaaccctgtttaaaacggcgattttaaccgctaaattcccttcttggcctgaggttcggcacaccagttatttgccgggttaatccctccgtcgttcgaacgataacccaggcaacctaaaattgagtcaaagagttcttcgtgacgatgcggtttatcactgccctgctgttgacgcagcagggcaaacgcctgctgactttcggtctgcgacaggaaagcgtcagacgcccaaacgattatcggcacccgaaactgttccggcggcgccatctcacgcggcgtaccgtgcagatgcgagttctcgcctatagactcaccatggtcagcggcgtaaaacaccagcgcttttttatcgcgcagctgatcaatcacccgcgagataaaggtatcggtatacaacacgctgttatcaaaggcgttaatcagctgatctttactacaggactggtccaccccatgcattcaggcgtaaagcgggcaaagctgcgcggataacgctgagaatagaggtagtgtgagcctttggtatgcagcacgacgaggtgtttacctttagggtagcgcttcagggattcctgtagttctctcaccagcagcatgtcgtctaccggcttgccgtcattgcgcttttcagaagcgataagctcgcggaaagagtagttattggtgttggcattgttgtaaaaccagacttcactctgcatagcgaacagctctgaactgaagcccagttggcgcatcacggcaaaaatattctgctctttcagcgtcctttgcggattatcctcaacgccgccttcgcgcacaaacatgcagcgcagagagagcttggtcgcggtgtcgcaggacgtgcccttaaaggccacgagatttttctctttcgacagcagcggcgtggtgtctcgtccatagccgagcagccccatatggtcccagcgcgtcgtttcaccgataatgaaaaccacgtaagtatcatcgatatccgcaggtggctcataacggtaagcctcggcaggattaaacaaatcgcccgcatcgcggctctcatcaatttgcgtatagacaaacaaaccgagtgccgccagccagttcgacggcagataagagtgcgccaccactccgccatagcttggcatatccacgttgcttaaccgctcgttggccttttgctctttgtccatcatccgcagcggcagccagaccagcaggcctgccaggagccacaccagcagcggcttcagccgttgaccgggcgttttcatctgttcgagcagcgtgccgcgcatttcattccgggcgatgagccacagcggtagcgcactgaccgccagcatccacagcacaaacttgaagccaatcacttctttactgagatcgatatcggtagtcatcaccgatacgataataccgtagccgatgaccacgttgaaataggtcatgtagtagctggccgcgaccgaaatcagcacaatcagcccggcgataagccgaaagaaatgttttccgccaaacgacagcagacgcagcacaaagaagccgaacaggatggtggtggcaatttcaatgacggcggcggtccattcaaacgacgtgggggagtcgatgagcgaggcgaagcgtcgtgtaaaaaccgacaagtttaaaaaaatgccaatataaatcgctaacaataaacagattttttgctgcgatagagtcttcactctattcatgaaagattattttccagagaatttgaaatattttgaatcattttgacatcaataaggcgggatagtttacatattcggtggggaaagtctgaaaagaaaacgggaggccttggcctcccgcagatcaatcacaaggctgtggctgacattacttaacggtaagggtcacgtcgatgttgccacgggtcgcgtttgagtatgggcaaacttgatgcgccttctcgaccaggtcttctgcgacgctgcgctcgatgccaggcagggtgatgtccaacgccacttcaatgccgaatccgcctgggatctggccaataccgactgcgccttcgattttagcatcagcaggaatacgtactttttccaacgaagcaacgtgcttcaacgcaccgaggaaacaggctgaataaccggcggcaaacagctgctctgggttagtcacttcgccgcccgcaccgcccatctcttttggcagacccagtttcacatcgagcacgccgtctgatgaggttgcacggccatcacgaccgccggtagctgaagcatgagcacggtaaattactttttcgatagacatgatgtattcctattaagtgactaagtgagtgataaccaataaataaacacgattaaatcgcacgctatatatttgattgtagcagaggcgcaaaaccttgcacctcgtgactacgtaatatctttaactaggctttacgctgcagattgcctctgagagtctccagctgctttttcagcgccgtcgcgtcctcgatactgcattctgccgcacaggcaatcgcctcgggaatttcacgcgctttttcctgcaatgtgcgcccagcgtcggtcagagaaataattacctgacgctcatcaaccttggcacggcgacgcaccaccagccctgcggtttcaaggcgtttaagcagcggcgtcaaggtcgccgaatccagaaacagcttttcaccaatttccgacaccatgacttcgtcctgctgccacagtaccagcatgaccagatattgcggataggtcaggtccagttggctcagcaacttacgataaactttattcaacgccagattggcggaatacagcgcaaagcataactgctggtcgagatgcagagcatgcattgcagcgggtgtggtgtcgtgttttgtgttcatgggaagaatataaatagcgcacgatattatagcaagcatatttacaattattattttttaccttgtccatgctataacaaagacaaggtgccaccagaggggaaatatcatgaccagcctagtcgacaaagcgagacgttatgcgagtaaagcgcacgccagcatcgatcagcgtcgcaaatatactaatgacccctatatcgtgcacccggaggccgtcgcgaatattgttggcagcgtgccccataccgaggccatgctggccgcggcgtggttacacgatactgtcgaagatacgccgaccacccttagcgacattaccgcgcattttggcgctgaggtcgcggaactggtggcgatgctgaccaacgtaagcctgagttgcgttggaaaccgcattgagcggaaaaacctcgaccgagagcacagcgccaaggcctctgccgccgccaaaaccatcaaactcgccgacctcatcgacaacctccgttcgctggtcacccacgatcctgactttgccaaaacctatcttgtcgagaaacgattgctgttgggcgtgctaaaagaaggcgacgccaccctgtggcgacaggcagaaatcatcattaacgacggcctgcaacgcctgcatcatcccccgcataacgttccaagtagctggtttcaaggcaccgaacaggcttatctggcgggaaattaacccgcctccaaatcgttcattgattgccctcgttttgtacaaatgctccgcagcggtgagacattgccgtgcacaaaaaatgagaaattagttaaataatcattaaaaacaaataattaaaaattggcacaccgcttgcttagatgaattcaatcttgtgtactagatggaattcaactatgacctcagtatcaacgccttatattggatatcagttacgtgactggcagcgtcattatcaaagcgcgccccagagcctacgcagttctttaggcatcgtactcaacagccttgacgaacgtgacaatgcctggctttatcgcgcaacgcccacccagcttgaagagcaaatcactcaacttgaaacactgcgcgaacaggccgggggttccctcgccacactgccgctgtatggcgtgccttttgcggtaaaagacaatattgacgtcgcaggatggccaaccaccgccgcctgcccggccttcgaatatatcgcgcaggccgatgccaccgtcgtcgccaatctgcaggccaaaggcgcaatcgtcatcggcaaaaccaatctcgaccagttcgcgaccgggctggtcggcacgcgatcaccgcacggtgcggtaaaaaacacctttaacccgaattacgtcagcggcggctcaagttcaggctctgcctccgtactggcacgcgggctggtcgccttctcgctcggtactgacaccgccggttcgggccgcgttccggcggggttcaataacattgtggggctgaaaccgaccaaaggctggctttcaaaccgcggtgtggtgcccgcctgtcgcctcaacgactgtgtttctattttcgcgctcagcgtggcggatgctgcatacgtcgccactctggccggcggctatgaccctgaagacgcctattcacgcgctaatccgcacacggccccggccgcgatgtcttcccaaccgcgctttgcggtacccgacagcctcgagttcttcggcgataccgagtccgagaaagctttccagctggcgctcgacaagctggtcagcagcggcgttagtctggtcaacatcgatttcacgcccttcaaagccttggccgaacagctgtattacggcgcatgggtcgccgagcgcaccgtcgccgtcggcaaaatttttgaagacacgccggaggtcatggaccctgtggtacgcggcattgtcgccagcggtctgaactacagcgcgacggatgcatggaaagccgaatatctgcgtgccgagctgtcgcgcaagattaatcaggcgctggaagggttcgacgcattggtggtgccaacctcgccaacccttcgcacgcttgacgaaatggtgcaggagccagtgctgtttaactcccagttcggcacctacaccaactttaccaacctcgccgatctctgcgcactggcgttgccgtcgagcattcgtgatgacggcctgccttcaggcatcacgttgattgctccagcctggcacgatgctgcgcttgccgcctttggccgccagtggcaacgcagcctgtctctgacgctgggcgcgaccgataaaaccctcaacgccgacagcgccatgacaggtcctatggccgtcagcgccgatcacgtccgcgttgccgtcgtcggcgcacacctcaccggtatgccgctaaatttccagctcaccacccgcaacgccgtgcgcgtcgagcaaacccgtaccgccagcgattacaaactttatgcccttgctaatacccagccgccgaaaccgggtctggttaaagacgaaggcggcagcaacatcatcgttgaactttgggatattcctctggcgcgcttcggtgaatttgtggccgagatccccgcgccgctgggcattggcacacttcagctggctgacggccgcagcgtaaaaggctttatctgcgagccttgggctatcgacagcgcaaccgacgtcacctcgttcggcggctggagaagctacgtcgagcacctgaaatccaccgccgcgaaaaacgcctgaggagccacgcacatgttcacgactgtcctgattgccaaccgcggtgaaatcgcctgccgtgccatccgcaccttgaaacgtctcggcgtcaccagcgtggcggtctactcggacgccgaccgcaacgccccgcacgtgaccgatgccgatatcgctgtcgcgcttggcggtgaaaaagcggcggagagttacctgctgatcgacaaaattctggccgccgctaaagagaccggcgcacaggcgatttatcctggctacggttttttatctgaaagcgccgagtttgccgacgcctgcgaggaagccggcatcgcctttatcggcccgactgcacatcaaattcgtgaattcggccttaagcaccgcgcccgtgagttagccgcccaagccgacgtaccgatgaccccgggcactgccttgctcgacagcattgacgatgcggcggccgctgccgcgcatattggctatcccgtcatgctgaaaagcaccgcaggcggcgggggattggcctgacccgctgcgatgacgaagccgctctgcgcagtgcgtgggacagcgtaaaacgcctcggcgagcagttcttccgtgacgcaggcgtgtttctcgaacgcttcgttgaccgcgcgcgtcacgtagaagtgcagatttttggcgacggtaaaggcaaggtggttgcactcggcgagcgcgactgttcgctgcagcgccgcaaccagaaagtggtggaagaaaccccggcccctaacctgccgcaggcaacgcgtgacgcactgcatcgtgcagcagtgcagcttggcgaatcggtcaattatcgcagcgccggtacggtcgaattcatctacgacgccgcgcgcgacgagttttatttccttgaagtgaatacgcgtttgcaggtcgagcatccggtcaccgaggaggttaccggcctcgacctgatcgaatgcatgctgcgcgtcgccgccgagcaaccgctggactggccgcgcatgcagcagccaccaaaaggggtggctattgaagtgcgactttacgccgaagatccgctgaaaaacttcctgccaagccccggtgtactgaccgaagtgttcttccctgaagacgtacgcgtcgatggctgggtgtcgaccggcagcgaagtctcggcgttttatgacccgatgattgccaagctgattgttcacggcgagacccgcgcgcaggcactggaaaaaatgtctcaggcgttggccgcaacccgcctgcacggcatcgccagcaatattgactatctgcgtcaggtcgttgcgtcaccggtgttccatcagggcgagatgtggacgcgtatgctcgacggcttcgagtatgcgccgcacgccgtcgaggttatctcacccggcacctatagcagcattcaggactatccgggccgtctcggctattgggacatcggcgtacccccttccggcccgatggacgattttgcctttcgtctggcgaaccgcatcgtcggtaaccctctcgacgccgccggtctggaatttactctgcaaggcccgacgctgcgcttccactgtgacgccaccatcgcactcaccggcgcgcgctgcccggcggacgttgacggcgttgagattgcctattgggcgccggttgacgtaaaggccgggcaaatattgacgctgggccgcgccaccagcggctgtcgcacctatcttgccgtgcgtaacggctttgacgtcccggtttatctcggcagccgttcgaccttcgtgcttggccagtttggcggccacgccggtcgcaccctgcgcgtcgccgacatgctgaacgtctcgcagcctgaacttgccgcctgcaccacgcccgcgccagtcggtcttccgcaggccgccgctgaagacattgttccggtctatggcgatgaatggaatattggcgtgctctatggcccacacggcgcgccagacttcttcaccgaagattctatcgatgccttcttcgaggcagagtggcaggtgcactacaactctaaccgcctcggcgtgcgcctgaccggccctaaaccccagtgggcgcgtctggacggcggcgaagcaggcctgcatccctccaacgtgcatgactgtgaatacgccatcggatcgataaactttaccggtgacttcccggtcatcctgacccgcgacggaccgagcctcggcggctttgtttgcccagtcaccatcgccaaggccgagctgtggaaggttggccaggtgaaacccggcgaccgaatccgcttccatccgatcggctttgaacaggctcaggcgctggaaatggcccagcagggcaccctcgattcgctgatgccgattgaagcgatggcgctaccggtcccttctttgctgccgaccaccactgcctcggcaaccattcttgcccagctcccagccacggacgagcgcccgagcgtggtctatcgccaggccggtgacggctacgtgctgattgagtacggcgataacgtgctggatctggcgctgcgtctgcgcatctatctgctgatgaaagctctccgcgaagccggtcgggcgggcgtcgaagagctctcccccggtgtccgttcgctacaggtacgttatgacagccgcgtcatccatcagtcggcgctgctacagcatctgctgacgttggaacaccaattggctgacgtgagcaggctgaaaattccgacccgcatcgtgcacatgccaatggcgttcgaagataccgccacgctaggcgcggtcgaacgttatcagcaaaccgtgcgcgccgacgcgccgtggctgccgaacaacgtcgatttcattcagcgcaccaatgggttggcaacgcgtgaggaagtgcgagacatcattttcaacgccagctatctgatcctcggcctcggcgacgtgtacctcggcgcgccgtgtgccgtgccagtcgacccgcgccatcgcctgctgagctccaaatataatccggcacgcacctacaccgccgagggcaccgtcggtattggtggtatgtatatgtgcatctacggcatggactcaccgggcggctatcagctggtgggccgcacgctgccaatctggaataaattccttaaaaacagccagttcgaacaaggtgaaccctggctgctgcactttttcgatcaggtgcgtttctatcaggtcaccgagaccgaactggatcaacagcgtgacgctttccgcgaaggccgcgctcaggtacgcattgaacacaccgagttcgacttcgccgaatataaccgctttttggccgacaatgccgatgatatcgccgatttccgcctgcgccagcacagcgccttcatcaatgaagtggcgcactggcaggcacaggaaagcgccgccgtcgaggcggcggttaacggcgtgcagccggtggaaaacctcgccccccgccgggcgagcgggtcagcgccgatttgaacggtaatgtctggaagattttggtcgaaccgggtcaatacgttgaagccggtcagccgcttatcgtggtggaagcgatgaaaatggagcttgcggtcaatgcgccctgctccggcacggtgctgaaaattggctgccagcagggtcgtccggtcggaccgggtgacgccctgctgtggattgataaagacggaatcggccaggaataggccccaaaggagcatttatgcagcttaccggctcacgtagcggacgcaacaaggccaggcctgagggtctggcagaaagaatctatctccagctcaaggacgacattttcagttttcgcatgctgcccggtgacaaatttagcgagaacgagattgccgaaagaatggacgtgagccgcacgccggtgcgtcaggcgcttttctggctggagcgtgagggctacgtggaggtgtttttccgcagcggctggcaggtacgaccgtttgatttcgagtacttcgaacagctttatgacctgcgcatcgttctggaactcgaggcggtaaaacgcctctgtacgatggacgtgacgcccgagccactgtttgcactgcaaagtttctggatagatgagccaaggctggaggacgggcaagaggtttctcggttcgacgaagagtttcacatggcgttggtggcggcagcgggcaacggtgagatggcaaaaatccaccgcgacctgactgagaaaatccgcatcatccggcggctggactttaccaaagacgcgcgcgtcaacgcgacctatagcgaacacgcaagcattttactcgccatcatgcagcgccagacccaggaggcacaacgccaactacaggaccacattgccgtcagtaaagccgaggtgcgcaaaataactcttcatatgctgcatcaggcgagaccagaagacgaagcggacaccccgtcttcgtgacttttttaaaacgtatttcgacacctaaacacagcacgccctaaagatttcacgctgctgccaagcctggcagcctgaaagatgaccggcttggcacttttaacaggagtacttatgcaacgtcgtcgctttattaaagcctttgccctctcggcaaccgtggtcagtatgggtctggcattcgctgcacaggccgccgacaccattaaggtcggtattatgcattcactttccggcaccatggccatctctgaaacgccgttgaaagacgtcgcgctgatgaccattgatgacattaacgcgcacggtggcgtgctgggtaaaaagctggagccggtggtggttgatcctgcgtcaaactggccgctgttcgctgaaaaagcccgccaactgctgacccaggacaaggtcgcagtggtgttcggttgctggacttcggtctcacgcaaatccgtgctgcccgtgttcgaagagctgaacggcctgctgttctatccggtgcaatacgagggtgaggagatgtcgccgaacgtcttctacaccggcgcagcgcctaaccagcaggccattcctgccgtgcagtacctgatgagcgaagacggcggcggtgccaaacgcttcttcctgctgggtaccgactacgtctatccgcgcaccaccaacaagatccttcgcgcctacctgcactccaaaggcgttcaggataaagacattgaagaggtctataccccgttcggctacagcgattatcagaccatcgtttccaacatcaagaaattcgcggctggcggtaaaacggctgtgatttccaccatcaacggtgactccaacgttcccttttacaaggagctggctaaccagggcgtgaaagcgaccgatgtgccggtggttgccttctcggtcggtgaagaagagctgcgcgggatagacaccaagccgctggtcggcgatttggcggcgtggaactacttccagtcgctggataacccaaccaacaaagccttcgttgccgaatggaaagcctacgccaagtcgcacaacctgccgaacgccgataccgcggtcaccaatgatccgatggaggcaacctacgtgggtatccacatgtgggcacaggccgttgagaaagcgggcacaaccgacgtcgacaaagtccgcgcggcaatggccggtcagaccttcaaggctccggacggctacaccctgaccatggacaaaaccaaccaccacctgcacaaaccggtgatgatcggagaaatccagtccaatggtcagttcaacgtggtgtggcagaccgacaaaccggtgcgcgcccagccgtggagcccttatattccgggtgacgacaagaagcctgactatccggtgaaaagcactcagtaattgacctgaaggtccgtcacggcctgtgctgcctttcacaagtgaaggccgtggcggtctcgtcgtatcagattaataaagcgatgatgactatgatgaaactcctgcgcttcccccgtttgcgactcggcctcacgccgggcctgcgaaccctgactttcctgctttgctgcctgccgttgtgggccaaggccggccctgccgatgacttcgctgcggccagtcgttccgagcaggcaacgttgcttcagcagtgggcgactgacccgcagcctgagcgtttaccgctgttggaggcactaaagcaggaagatgtcgtgattgatgaggcgcatcatgcgttcatcaggcagggcgatacccttgcgccgcttgagggcgcggctaagccgcagggcgacgtcaaggcagtttggttgaacaaccggctgcgtaacctgataactaacgccctctcggcacaccgtctggtcagcaaagacagcgccgtgcgcctgcaggccgctaaatctttgcagcgcgaggcgcaggcagaccagctgccgctgctgaccaaacgactggcgctggaacaagacgccacggtgcacgccgcactcagcattgcactggcaaacctgcagcttagcgatccgaatccgcaggttcgcctgcgcgcggtggagctgctcggcgaatcttcagaccccgacactcagggccatttgcaaccgctgaccgaccctaaagtcgagaccgacgcgaccgtgcgcaccgccgcgctggtcagcctcaaggccgtgcagcatcggctgatgattggcgactggctgggtcaggccttcaccggactgtcgctgggttcgattctactgttggctgcgttaggtctggctatcacctacggcctgctcggcgtcatcaacatggcccacggcgagatgctgatgttgggttcgtactcgacctacatggtgcagtccttcttccagcactatgcgcccggcctgttggccatctatccgctggtggcgctgccggtggcgttctttattacttctggcgtgggcatgctgctcgaacgttctgtcattcgccacctctacggacgcccgctcgaaacgctgctggctacctggggtatcagtctgatcctgattcagggcgtacgggtgattttcggtgcgcaaaacgttgaggtcgccaacccgaactggctctccggcggcattcagctgctgccaaatctggtgctgccgtataaccgcatcgcggtcattattttcgtgctgatggtgctggcgctgacctggctgctgcttaacaagacgcgtctgggcatgaacgtgcgtgccgtaacccaaaaccgcgccatggccgcctgctgcggcgtgccgaccggtcgagtggacatgctggccttcggcctcggttcgggcattgccggactcggcggcgtcgcactctcgcagcttggcaacgtcgggccggaactgggtcagggctacatcattgactccttcctggtggtcgtactcggcggcgtcggccagctggcaggcaccgtcgtggccgccttcggcctcggcatcgtgaataaaatcctcgaaccggaaatcggcgcggtgttgggtaaaatcctgatactggcgatgatcgtcctgtttatccaaaaacgtccgcagggactcttcgcctttaaaggcagggtgattgactgatgacgcaacccttgacgattacaggcgtacaaaaggcgccacgtctggcgatgagcctcggcacgctggtgcttattgcgctgctggtgatgccctttttggcactgctgccgcagacccatccactggcgatttcaacctataccctgacgctggtcggcaagatcctttgctatgcgatcgtcgcgatcgccctcgatctggtgtggggctacgccgggctgctgtcgctcgggcatggtttgttcttcgcactcggcggctacgcgatgggatgtacctgattcgccaggccgcgggcaacaatttgccagactttatgtcattcctctcgtggaccgaactgccgtggttctgggcaggaacacagcattttgcctgggcactgtgcctgatagtgctggtgcccggcctgctggcgttcgttttcggctacttcgccttccgctccaaaatcaaaggcgtgtacttctcgataatgacgcaggcgctgacttacgccggtatgttgctgtttttccgcaatgagaccggcttcgggggcaataacggcttcaccggctttaccaccctgctcggctttcaggtcacggcgacctcaacgcgaatcgggctgtttatcgccaccgtgctgctgctggtggccagtctggcactcggtttcacgctggcacgtagcaaatacggccgcgtgctgacggcggtgcgcgacgccgagaaccggcttatcttctgcggctatgaccctaaaggcttcaagctgtttgtctggacgatttcggcaatgatctgcggtctggcaggcgcgctttacgtgccgcaggtcggcatcatcaacccgagcgagatgtcgccaactaactctatcgaggccgccatctgggtcgcactgggcggacgcggcacgctgatcggtccgattctgggtgcgggcatcgtcaacggggctaaaagttggtttaccgtcgccattcccgagtactggcagtttattctcggcggcatgtttattgtggtgacgctgttcctgcccgagggcgtgattggcctgctgcgtaaaaggaaagcccaatgaactcaatgacgctggacctcttcactcaacagcagcctgccgataagcaccgcgagcagaccgatccgattctgacgctggataaaatcaacgtcagctttgacggattcaaggcgttaactgacctctcgctgcgcatcggcgttggagaattacgctgcgtcattggtccgaacggcgcgggaaaaacgacgctaatggatgttattaccggcaagacacggcctaagtcgggacaggtactttatgaccagaatatcgacctgacccggctggatccggtgcgtatcgcacagtcgggcattggtcgtaaattccagaagccaacggtgtttgaggcgctgacggtgtttgaaaacctcgaaatcgcgcaaaaaaccaataaatcggtgtgggcctgtctgcgcgcgaaaatgaacagcgaacagcgcgaccggatcgacgaaatgctggtcacgttgcgtttgcagggcgaacggcatcgcatggcg

(The sequence listing continues in the following parts.)
